(19) United States
(12) Patent Application Publication
(10) Pub. No.: US 2021/0095276 A1
(43) Pub. Date: Apr. 1, 2021

(54) OLIGONUCLEOTIDES FOR MODULATING ERC1 EXPRESSION

(71) Applicant: Roche Innovation Center Copenhagen A/S, Hørsholm (DK)

(72) Inventors: Peter HAGEDORN, Hørsholm (DK); Lykke PEDERSEN, (US)

(73) Assignee: Roche Innovation Center Copenhagen A/S, Hørsholm (DK)

(21) Appl. No.: 15/733,391

(22) PCT Filed: Jan. 15, 2019
(86) PCT No.: PCT/EP2019/050881

§ 371 Date: Jul. 17, 2020

(30) Foreign Application Priority Data
Jan. 17, 2018 (EP) 18152080.0

(51) Int. Cl. C12N 15/113

(52) U.S. Cl. CPC C12N 15/113; C12N 2310/315; C12N 2310/3231; C12N 2310/11

(57) ABSTRACT

The present invention relates to antisense oligonucleotides that are capable of reducing expression of ERC1 in a target cell. The oligonucleotides hybridize to ERC1 pre-mRNA. The present invention further relates to conjugates of the oligonucleotide and pharmaceutical compositions and methods for treatment of disease associated with ERC1 overexpression, such as cancer or Dengue virus infection using the antisense oligonucleotide.

### FIELD OF INVENTION

[0001] The present invention relates to oligonucleotides (oligomers) that are complementary to ELKS/RAB6-Interacting/CAST Family Member 1 (ERC1) transcript, leading to modulation of the expression of ERC1 in a cell. Such oligonucleotides may be used for reducing ERC1 transcript in a target cell. Modulation of ERC1 expression is beneficial for a range of medical disorders, such as dengue virus or cancer, such as thyroid carcinoma, breast cancer, head and neck cancer, colorectal cancer, renal cancer testis cancer, melanoma or metastasis formation.

### BACKGROUND

[0002] ELKS/RAB6-Interacting/CAST Family Member 1 (ERC1) is a member of a family of RIM-binding proteins, which are active zone proteins that regulate neurotransmitter release.

[0003] Astro et al. J Cell Sci, 2014, 127: 3862-3876; used siRNA targeting ERC1 to show that a complex comprising Liprin-alphal, ERC1 and LL5 is important in cell migration in vitro, which is a fundamental process for tumor metastasis formation.

[0004] Alpay et al 2015 Breast Cancer Res. Vol 151 p. 75-87 shows that in vitro knock down of ERC1 with shRNA influences NF-kappaB signaling in breast cancer cell lines.

[0005] ERC1 has also been shown to rearrange with oncogenes or kinases in a varios cancers such as melanoma and papillary thyroid carcinomas, see for example WO2014130975 ERC1 and Nakata et al 1999 Genes, Chromosomes and Cancer Vol 25 p. 97-103.ERC1. Khadka et al. 2011, showed that downregulation of ERC1 using siRNA in Dengue virus infected cells caused a significant decrease in virus replication in the cells.

[0006] ERC1 None of the references above disclose a single stranded antisense oligonucleotides targeting ERC1, and in particular they do not disclose the concept of targeting intron sequences or repeated sequences in the ERC1 transcript.

[0007] Antisense oligonucleotides targeting repeated sites in the same RNA have been shown to have enhanced potency for downregulation of target mRNA in some cases of in vitro transfection experiments. This has been the case for GCGR, STST3, MAPT, OGFR, and BOK RNA (Vickers at al. PLOS one, October 2014, Volume 9, Issue 10). WO 2013/120003 also refers to modulation of RNA by repeat targeting.

### OBJECTIVE OF THE INVENTION

[0008] ERC1 is involved in the development and progression of a number of tumors as well as a host factor in dengue virus infections. The present invention provides antisense oligonucleotides capable of modulating ERC1 mRNA and protein expression in vivo and in vitro. Accordingly, the present invention can potentially be used in combination therapy together with the standard cancer care therapies and potentially can alleviate symptoms of cancers, such as metastatic cancer, or cancers such as thyroid carcinoma breast cancer, head and neck cancer, colorectal cancer, renal cancer testis cancer and melanoma. Furthermore, the antisense oligonucleotides of the present invention may be used for treatment or alleviation of Dengue virus infection.

### SUMMARY OF INVENTION

[0009] The present invention provides antisense oligonucleotides, such as gapmer oligonucleotides, which are complementary to a target mammalian ERC1 nucleic acids, and uses thereof.

[0010] The present invention provides oligonucleotides which comprise contiguous nucleotide sequences which are complementary to certain regions or sequences present in target mammalian ERC1 nucleic acids.

[0011] The compounds of the invention are capable of inhibiting mammalian ERC1 nucleic acids in a cell which is expressing the mammalian ERC1 nucleic acid.

[0012] The present invention provides for an antisense oligonucleotide compound targeting a mammalian ERC1 nucleic acid, and in vitro and in vivo uses thereof, and their use in medicine.

[0013] Accordingly, a first aspect the invention provides an antisense oligonucleotide of 10 to 50 nucleotides in length, which comprises a contiguous nucleotide sequence of 10 to 30 nucleotides in length with at least 90% complementarity, such as fully complementary, to a mammalian ERC1 target nucleic acid, wherein the antisense oligonucleotide is capable of reducing the expression of the mammalian ERC1 target nucleic acid, in a cell.

[0014] In a further aspect the invention provides an antisense oligonucleotide, wherein the contiguous nucleotide sequence is at least 90% complementary to a sequence selected from the group consisting of SEQ ID NO: 1, 2, 3, 4, 5, 6, 7, 8, 9, 10, 11, 12 and 13 or a naturally occurring variant thereof.

[0015] In a further aspect, the invention provides an antisense oligonucleotide, wherein the contiguous nucleotide sequence is at least 90% complementary, such as fully complementary, to an intron region present in the pre-mRNA of mammalian ERC1 target nucleic acid (e.g. SEQ ID NO 1).

[0016] In a further aspect the invention provides the antisense oligonucleotide, wherein the contiguous nucleotide sequence is at least 90% complementary, such as fully complementary, to a region of SEQ ID NO 1, selected from the group consisting of position 88284-88297, 88378-88391, 88425-88438, 88472-88485, 88517-88530, 88656-88669, 88703-88716, 88750-88763, 88795-88808, 88842-88855, 88889-88902, 88936-88949, 88983-88996, 89030-89043, 89077-89090, 89124-89137, 89171-89184, 89265-89278, 89312-89325, 89359-88372; 88374-88393, 88421-88440, 88468-88487, 88513-88532, 88652-88671, 88699-88718, 88746-88765, 88791-88810, 88838-88857, 88885-88904, 88932-88951, 88979-88998, 89026-89045, 89073-89092, 89120-89139, 89167-89186, 89261-89280, 89308-89327, 89355-89374; 88374-88391, 88421-88438, 88468-88485, 88513-88530, 88652-88669, 88699-88716, 88746-88763, 88791-88808, 88838-88855, 88885-88902, 88932-88949, 88979-88996, 89026-89043, 89073-89090, 89120-89137, 89167-89184, 89261-89278, 89308-89325, 89355-89372; 88376-88391, 88423-88438, 88470-88485, 88515-88530, 88654-88669, 88701-88716, 88748-88763, 88793-88808, 88840-88855, 88887-88902, 88934-88949, 88981-88996, 89028-89043, 89075-89090, 89122-89137, 89169-89184, 89263-89278, 89310-89325, 89357-89372, 451815-451834, 451816-451833, 451818-451833, 451818-4518310f SEQ ID NO: 1.

[0017] In a further aspect, the invention provides antisense oligonucleotides which comprises a wherein the contiguous nucleotide sequence is 95% complementary, such as fully complementary, to a target region of 10-22, such as 14-20, nucleotides in length of the target nucleic acid of SEQ ID NO: 1, wherein the target region is repeated at least 5 or more times across the target nucleic acid.

[0018] In a further aspect the invention provides the antisense oligonucleotide, wherein the antisense oligonucleotide, or contiguous nucleotide sequence thereof is selected from the group consisting of TCATttctatCTGT (Compound 15_1); AATCatttctatctgtaTCT (Compound 16_1); TCAtttctatctgtATCT (Compound 17_1); and TCATttctatctGTAT (Compound 18_1; wherein capital letters represent LNA nucleosides, such as beta-D-oxy LNA nucleosides, lower case letters represent DNA nucleosides, optionally all LNA C are 5-methyl cytosine, and all internucleoside linkages are phosphorothioate internucleoside linkages.

[0019] In a further aspect the invention provides a conjugate comprising the antisense oligonucleotide according to the invention, and at least one conjugate moiety covalently attached to said oligonucleotide.

[0020] In a further aspect the invention provides a pharmaceutical composition comprising the oligonucleotide according to the invention or the conjugate according to some aspects of the invention, and a pharmaceutically acceptable diluent, solvent, carrier, salt and/or adjuvant.

[0021] In a further aspect, the invention provides a pharmaceutically acceptable salt of the antisense oligonucleotide or conjugate according to the invention the invention.

[0022] In a further aspect the invention provides an in vivo or in vitro method for inhibiting mammalian ERC1 expression in a target cell which is expressing the mammalian ERC1, said method comprising administering an oligonucleotide, the conjugate, the pharmaceutically acceptable salt, or the pharmaceutical composition according to the invention in an effective amount to said cell.

[0023] In a further aspect the invention provides a method for treating or preventing a disease comprising administering a therapeutically or prophylactically effective amount of an oligonucleotide, the conjugate, the pharmaceutically acceptable salt, or the pharmaceutical composition according to the invention to a subject suffering from or susceptible to the disease.

[0024] In a further aspect the invention provides a use of the oligonucleotide, the conjugate, the pharmaceutically acceptable salt, or the pharmaceutical composition of the invention for the preparation of a medicament for treatment or prevention of cancers, such as metastatic cancer, or cancers such as thyroid carcinoma breast cancer, head and neck cancer, colorectal cancer, renal cancer testis cancer and melanoma. Furthermore, the antisense oligonucleotides of the present invention may be used for treatment or alleviation of Dengue virus infection.

### Definitions

### Oligonucleotide

[0025] The term “oligonucleotide” as used herein is defined as it is generally understood by the skilled person as a molecule comprising two or more covalently linked nucleosides. Such covalently bound nucleosides may also be referred to as nucleic acid molecules or oligomers. Oligonucleotides are commonly made in the laboratory by solid-phase chemical synthesis followed by purification. When referring to a sequence of the oligonucleotide, reference is made to the sequence or order of nucleobase moieties, or modifications thereof, of the covalently linked nucleotides or nucleosides. The oligonucleotide of the invention is man-made, and is chemically synthesized, and is typically purified or isolated. The oligonucleotide of the invention may comprise one or more modified nucleosides or nucleotides.

### Antisense Oligonucleotides

[0026] The term “Antisense oligonucleotide” as used herein is defined as oligonucleotides capable of modulating expression of a target gene by hybridizing to a target nucleic acid, in particular to a contiguous sequence on a target nucleic acid. The antisense oligonucleotides are not essentially double stranded and are therefore not siRNAs or shRNAs. Preferably, the antisense oligonucleotides of the present invention are single stranded. It is understood that single stranded oligonucleotides of the present invention can form hairpins or intermolecular duplex structures (duplex between two molecules of the same oligonucleotide), as long as the degree of intra or inter self-complementarity is less than 50% across of the full length of the oligonucleotide

[0027] Advantageously, the antisense oligonucleotide of the invention comprises one or more modified nucleosides or nucleotides.

### Contiguous Nucleotide Sequence

[0028] The term “contiguous nucleotide sequence” refers to the region of the oligonucleotide which is complementary to the target nucleic acid. The term is used interchangeably herein with the term “contiguous nucleobase sequence” and the term “oligonucleotide motif sequence”. In some embodiments all the nucleotides of the oligonucleotide constitute the contiguous nucleotide sequence. In some embodiments the oligonucleotide comprises the contiguous nucleotide sequence, such as a F-G-F′ gapmer region, and may optionally comprise further nucleotide(s), for example a nucleotide linker region which may be used to attach a functional group to the contiguous nucleotide sequence. The nucleotide linker region may or may not be complementary to the target nucleic acid.

### Nucleotides

[0029] Nucleotides are the building blocks of oligonucleotides and polynucleotides, and for the purposes of the present invention include both naturally occurring and non-naturally occurring nucleotides. In nature, nucleotides, such as DNA and RNA nucleotides comprise a ribose sugar moiety, a nucleobase moiety and one or more phosphate groups (which is absent in nucleosides). Nucleosides and nucleotides may also interchangeably be referred to as “units” or “monomers”.

### Modified Nucleoside

[0030] The term “modified nucleoside” or “nucleoside modification” as used herein refers to nucleosides modified as compared to the equivalent DNA or RNA nucleoside by the introduction of one or more modifications of the sugar moiety or the (nucleo)base moiety. In a preferred embodiment the modified nucleoside comprise a modified sugar moiety. The term modified nucleoside may also be used herein interchangeably with the term “nucleoside analogue” or modified “units” or modified “monomers”. Nucleosides with an unmodified DNA or RNA sugar moiety are termed DNA or RNA nucleosides herein. Nucleosides with modifications in the base region of the DNA or RNA nucleoside are still generally termed DNA or RNA if they allow Watson Crick base pairing.

### Modified Internucleoside Linkage

[0031] The term “modified internucleoside linkage” is defined as generally understood by the skilled person as linkages other than phosphodiester (PO) linkages, that covalently couples two nucleosides together. The oligonucleotides of the invention may therefore comprise modified internucleoside linkages. In some embodiments, the modified internucleoside linkage increases the nuclease resistance of the oligonucleotide compared to a phosphodiester linkage. For naturally occurring oligonucleotides, the internucleoside linkage includes phosphate groups creating a phosphodiester bond between adjacent nucleosides. Modified internucleoside linkages are particularly useful in stabilizing oligonucleotides for in vivo use, and may serve to protect against nuclease cleavage at regions of DNA or RNA nucleosides in the oligonucleotide of the invention, for example within the gap region of a gapmer oligonucleotide, as well as in regions of modified nucleosides, such as region F and F′.

[0032] In an embodiment, the oligonucleotide comprises one or more internucleoside linkages modified from the natural phosphodiester, such one or more modified internucleoside linkages that is for example more resistant to nuclease attack. Nuclease resistance may be determined by incubating the oligonucleotide in blood serum or by using a nuclease resistance assay (e.g. snake venom phosphodiesterase (SVPD)), both are well known in the art. Internucleoside linkages which are capable of enhancing the nuclease resistance of an oligonucleotide are referred to as nuclease resistant internucleoside linkages. In some embodiments at least 50% of the internucleoside linkages in the oligonucleotide, or contiguous nucleotide sequence thereof, are modified, such as at least 60%, such as at least 70%, such as at least 80 or such as at least 90% of the internucleoside linkages in the oligonucleotide, or contiguous nucleotide sequence thereof, are nuclease resistant internucleoside linkages. In some embodiments all of the internucleoside linkages of the oligonucleotide, or contiguous nucleotide sequence thereof, are nuclease resistant internucleoside linkages. It will be recognized that, in some embodiments the nucleosides which link the oligonucleotide of the invention to a non-nucleotide functional group, such as a conjugate, may be phosphodiester.

[0033] A preferred modified internucleoside linkage for use in the oligonucleotide of the invention is phosphorothioate.

[0034] Phosphorothioate internucleoside linkages are particularly useful due to nuclease resistance, beneficial pharmacokinetics and ease of manufacture. In some embodiments at least 50% of the internucleoside linkages in the oligonucleotide, or contiguous nucleotide sequence thereof, are phosphorothioate, such as at least 60%, such as at least 70%, such as at least 80% or such as at least 90% of the internucleoside linkages in the oligonucleotide, or contiguous nucleotide sequence thereof, are phosphorothioate. In some embodiments, other than the phosphorodithioate internucleoside linkages, all of the internucleoside linkages of the oligonucleotide, or contiguous nucleotide sequence thereof, are phosphorothioate. In some embodiments, the oligonucleotide of the invention comprises both phosphorothioate internucleoside linkages and at least one phosphodiester linkage, such as 2, 3 or 4 phosphodiester linkages, in addition to the phosphorodithioate linkage(s). In a gapmer oligonucleotide, phosphodiester linkages, when present, are suitably not located between contiguous DNA nucleosides in the gap region G.

[0035] Nuclease resistant linkages, such as phosphorothioate linkages, are particularly useful in oligonucleotide regions capable of recruiting nuclease when forming a duplex with the target nucleic acid, such as region G for gapmers. Phosphorothioate linkages may, however, also be useful in non-nuclease recruiting regions and/or affinity enhancing regions such as regions F and F′ for gapmers. Gapmer oligonucleotides may, in some embodiments comprise one or more phosphodiester linkages in region F or F′, or both region F and F′, which the internucleoside linkage in region G may be fully phosphorothioate.

[0036] Advantageously, all the internucleoside linkages in the contiguous nucleotide sequence of the oligonucleotide, or all the internucleoside linkages of the oligonucleotide, are phosphorothioate linkages.

[0037] It is recognized that, as disclosed in EP 2 742 135, antisense oligonucleotides may comprise other internucleoside linkages (other than phosphodiester and phosphorothioate), for example alkyl phosphonate/methyl phosphonate internucleosides, which according to EP 2 742 135 may for example be tolerated in an otherwise DNA phosphorothioate the gap region.

### Nucleobase

[0038] The term nucleobase includes the purine (e.g. adenine and guanine) and pyrimidine (e.g. uracil, thymine and cytosine) moiety present in nucleosides and nucleotides which form hydrogen bonds in nucleic acid hybridization. In the context of the present invention the term nucleobase also encompasses modified nucleobases which may differ from naturally occurring nucleobases, but are functional during nucleic acid hybridization. In this context “nucleobase” refers to both naturally occurring nucleobases such as adenine, guanine, cytosine, thymidine, uracil, xanthine and hypoxanthine, as well as non-naturally occurring variants. Such variants are for example described in Hirao et al (2012) Accounts of Chemical Research vol 45 page 2055 and Bergstrom (2009) Current Protocols in Nucleic Acid Chemistry Suppl. 37 1.4.1.

[0039] In a some embodiments the nucleobase moiety is modified by changing the purine or pyrimidine into a modified purine or pyrimidine, such as substituted purine or substituted pyrimidine, such as a nucleobased selected from isocytosine, pseudoisocytosine, 5-methyl cytosine, 5-thiozolo-cytosine, 5-propynyl-cytosine, 5-propynyl-uracil, 5-bromouracil 5-thiazolo-uracil, 2-thio-uracil, 2′thio-thymine, inosine, diaminopurine, 6-aminopurine, 2-aminopurine, 2,6-diaminopurine and 2-chloro-6-aminopurine.

[0040] The nucleobase moieties may be indicated by the letter code for each corresponding nucleobase, e.g. A, T, G, C or U, wherein each letter may optionally include modified nucleobases of equivalent function. For example, in the exemplified oligonucleotides, the nucleobase moieties are selected from A, T, G, C, and 5-methyl cytosine. Optionally, for LNA gapmers, 5-methyl cytosine LNA nucleosides may be used.

### Modified Oligonucleotide

[0041] The term modified oligonucleotide describes an oligonucleotide comprising one or more sugar-modified nucleosides and/or modified internucleoside linkages. The term “chimeric” oligonucleotide is a term that has been used in the literature to describe oligonucleotides with modified nucleosides.

### Complementarity

[0042] The term “complementarity” describes the capacity for Watson-Crick base-pairing of nucleosides/nucleotides. Watson-Crick base pairs are guanine (G)-cytosine (C) and adenine (A)-thymine (T)/uracil (U). It will be understood that oligonucleotides may comprise nucleosides with modified nucleobases, for example 5-methyl cytosine is often used in place of cytosine, and as such the term complementarity encompasses Watson Crick base-paring between non-modified and modified nucleobases (see for example Hirao et al (2012) Accounts of Chemical Research vol 45 page 2055 and Bergstrom (2009) Current Protocols in Nucleic Acid Chemistry Suppl. 37 1.4.1).

[0043] The term “% complementary” as used herein, refers to the proportion of nucleotides (in percent) of a contiguous nucleotide sequence in a nucleic acid molecule (e.g. oligonucleotide) which across the contiguous nucleotide sequence, are complementary to a reference sequence (e.g. a target sequence or sequence motif). The percentage of complementarity is thus calculated by counting the number of aligned nucleobases that are complementary (from Watson Crick base pair) between the two sequences (when aligned with the target sequence 5′-3′ and the oligonucleotide sequence from 3′-5′), dividing that number by the total number of nucleotides in the oligonucleotide and multiplying by 100. In such a comparison a nucleobase/nucleotide which does not align (form a base pair) is termed a mismatch. Insertions and deletions are not allowed in the calculation of % complementarity of a contiguous nucleotide sequence. It will be understood that in determining complementarity, chemical modifications of the nucleobases are disregarded as long as the functional capacity of the nucleobase to form Watson Crick base pairing is retained (e.g. 5′-methyl cytosine is considered identical to a cytosine for the purpose of calculating % identity).

[0044] The term “fully complementary”, refers to 100% complementarity.

[0045] The following is an example of an oligonucleotide (SEQ ID NO: 15) that is fully complementary to the target nucleic acid (SEQ ID NO: 24):

(SEQ ID NO: 24)
5′ aagtcgatatacagagatacagatagaaatgatttgtaatat 3′
(SEQ ID NO: 15)
3′ TGTCTATCTTTACT 5′

### Identity

[0046] The term “Identity” as used herein, refers to the proportion of nucleotides (expressed in percent) of a contiguous nucleotide sequence in a nucleic acid molecule (e.g. oligonucleotide) which across the contiguous nucleotide sequence, are identical to a reference sequence (e.g. a sequence motif). The percentage of identity is thus calculated by counting the number of aligned bases that are identical (a match) between two sequences (in the contiguous nucleotide sequence of the compound of the invention and in the reference sequence), dividing that number by the total number of nucleotides in the oligonucleotide and multiplying by 100.

[0047] Therefore, Percentage of Identity=(Matches×100)/Length of aligned region (e.g. the contiguous nucleotide sequence). Insertions and deletions are not allowed in the calculation the percentage of identity of a contiguous nucleotide sequence. It will be understood that in determining identity, chemical modifications of the nucleobases are disregarded as long as the functional capacity of the nucleobase to form Watson Crick base pairing is retained (e.g. 5-methyl cytosine is considered identical to a cytosine for the purpose of calculating % identity).

### Hybridization

[0048] The term “hybridizing” or “hybridizes” as used herein is to be understood as two nucleic acid strands (e.g. an oligonucleotide and a target nucleic acid) forming hydrogen bonds between base pairs on opposite strands thereby forming a duplex. The affinity of the binding between two nucleic acid strands is the strength of the hybridization. It is often described in terms of the melting temperature (Tₘ) defined as the temperature at which half of the oligonucleotides are duplexed with the target nucleic acid. At physiological conditions Tₘ is not strictly proportional to the affinity (Mergny and Lacroix, 2003, Oligonucleotides 13:515-537). The standard state Gibbs free energy ΔG° is a more accurate representation of binding affinity and is related to the dissociation constant (K_{d}) of the reaction by ΔG°=−RTIn(K_{d}), where R is the gas constant and T is the absolute temperature. Therefore, a very low ΔG° of the reaction between an oligonucleotide and the target nucleic acid reflects a strong hybridization between the oligonucleotide and target nucleic acid. ΔG° is the energy associated with a reaction where aqueous concentrations are 1M, the pH is 7, and the temperature is 37° C. The hybridization of oligonucleotides to a target nucleic acid is a spontaneous reaction and for spontaneous reactions ΔG° is less than zero. ΔG° can be measured experimentally, for example, by use of the isothermal titration calorimetry (ITC) method as described in Hansen et al., 1965, Chem. Comm. 36-38 and Holdgate et al., 2005, Drug Discov Today. The skilled person will know that commercial equipment is available for ΔG° measurements. ΔG° can also be estimated numerically by using the nearest neighbor model as described by SantaLucia, 1998, Proc Natl Acad Sci USA. 95: 1460-1465 using appropriately derived thermodynamic parameters described by Sugimoto et al., 1995, Biochemistry 34:11211-11216 and McTigue et al., 2004, Biochemistry 43:5388-5405. In order to have the possibility of modulating its intended nucleic acid target by hybridization, oligonucleotides of the present invention hybridize to a target nucleic acid with estimated ΔG° values below −10 kcal for oligonucleotides that are 10-30 nucleotides in length. In some embodiments the degree or strength of hybridization is measured by the standard state Gibbs free energy ΔG°. The oligonucleotides may hybridize to a target nucleic acid with estimated ΔG° values below the range of −10 kcal, such as below −15 kcal, such as below −20 kcal and such as below −25 kcal for oligonucleotides that are 8-30 nucleotides in length. In some embodiments the oligonucleotides hybridize to a target nucleic acid with an estimated ΔG° value of −10 to −60 kcal, such as −12 to −40, such as from −15 to −30 kcal or −16 to −27 kcal such as −18 to −25 kcal.

### Target Nucleic Acid

[0049] According to the present invention, the target nucleic acid is a nucleic acid which encodes mammalian ERC1 and may for example be a gene, a RNA, a mRNA, and pre-mRNA, a mature mRNA or a cDNA sequence. The target may therefore be referred to as an ERC1 target nucleic acid.

[0050] The oligonucleotide of the invention may, for example, target exon regions of a mammalian ERC1RNA, or may, for example, target any intron region in the ERC1pre-mRNA (see, for example, Table 1).

TABLE 1
Human ERC1Exon and Intron regions of one of the splice variants.

| Exon regions in the human | | | Intron regions in the human | | |
|---|---|---|---|---|---|
| ERC1premRNA (SEQ ID NO: 1) | | | ERC1premRNA (SEQ ID NO: 1) | | |
| ID | start | end | ID | start | end |
| E1 | 700 | 814 | I1 | 815 | 37239 |
| E2 | 37240 | 38064 | I2 | 38065 | 92655 |
| E3 | 92656 | 93072 | I3 | 93073 | 114241 |
| E4 | 114242 | 114316 | I4 | 114317 | 119683 |
| E5 | 119684 | 119839 | I5 | 119840 | 125357 |
| E6 | 125358 | 125525 | I6 | 125526 | 1151111 |
| E7 | 151112 | 151279 | I7 | 151280 | 190031 |
| E8 | 190032 | 190169 | I8 | 190170 | 191416 |
| E9 | 191417 | 191557 | I9 | 191558 | 192772 |
| E10 | 192773 | 192913 | I10 | 192914 | 199350 |
| E11 | 199351 | 199544 | I11 | 199545 | 246260 |
| E12 | 246261 | 246396 | I12 | 246397 | 272525 |
| E13 | 272526 | 272657 | I13 | 272658 | 299343 |
| E14 | 299344 | 299504 | I14 | 299505 | 381324 |
| E15 | 381325 | 381469 | I15 | 381470 | 417640 |
| E16 | 417641 | 417739 | I16 | 417740 | 454053 |
| E17 | 454054 | 454242 | I17 | 454243 | 499584 |
| E18 | 499585 | 505425 | | | |

[0051] Suitably, the target nucleic acid encodes an ERC1 protein, in particular mammalian ERC1, such as human ERC1 (See for example Tables 2 and 3) which provides the genomic sequence, the mature mRNA and pre-mRNA sequences for human, mice rat and monkey ERC1).

[0052] In some embodiments, the target nucleic acid is selected from the group consisting of SEQ ID NO: 1, 2, 3, 4, 5, 6, 7, 8, 9, 10, 11, 12 and 13 or naturally occurring variants thereof (e.g. sequences encoding a mammalian ERC1 protein.

[0053] The target nucleic acid many, in some embodiments, be a RNA or DNA, such as a messenger RNA, such as a mature mRNA or a pre-mRNA which encodes mammalian ERC1 protein, such as human ERC1, e.g. the human pre-mRNA sequence, such as that disclosed as SEQ ID NO:1 or human mature mRNA as disclosed in SEQ ID NO:2, SEQ ID NO:3, SEQ ID NO:4, SEQ ID NO:5, SEQ ID NO:6, SEQ ID NO:7, SEQ ID NO:8, SEQ ID NO:9, SEQ ID NO:10, SEQ ID NO:11, and SEQ ID NO:12, or naturally occurring variants thereof (e.g. sequences encoding a mammalian ERC1 protein).

[0054] If employing the oligonucleotide of the invention in research or diagnostics the target nucleic acid may be a cDNA or a synthetic nucleic acid derived from DNA or RNA.

[0055] For in vivo or in vitro application, the oligonucleotide of the invention is typically capable of inhibiting the expression of the ERC1 target nucleic acid in a cell which is expressing the ERC1 target nucleic acid. The contiguous sequence of nucleobases of the oligonucleotide of the invention is typically complementary to the ERC1 target nucleic acid, as measured across the length of the oligonucleotide, optionally with the exception of one or two mismatches, and optionally excluding nucleotide based linker regions which may link the oligonucleotide to an optional functional group such as a conjugate, or other non-complementary terminal nucleotides (e.g. region D′ or D″).

[0056] Further information on exemplary target nucleic acids is provided in tables 2 and 3.

TABLE 2
Genome and assembly information for ERC1 across species.

| | | | Genomic coordinates | | | |
|---|---|---|---|---|---|---|
| Species | Chr. | Strand | Start | End | Assembly | Ensembl ID |
| Human | 12 | fwd | 990509 | 1495933 | GRCh38.p7 release 107 | ENSG00000082805 |
| MusMusculus | 6 | rev | 119570796 | 119848167 | GRCm38.p5 | ENSMUSG00000030172 |
| rnorvegicus | 4 | rev | 152087379 | 152380184 | Rnor_6.0 | ENSRNOG00000009264 |
| Cynomolgus monkey | 11 | fwd | 1015931 | 1585322 | Macaca_fascicularis_5.0 release 100 | |
| | | | | | (GCF_000364345.1) | |

Fwd = forward strand. The genome coordinates provide the pre-mRNA sequence (genomic sequence).

TABLE 3
Sequence details for ERC1 across species.

| Species | RNA type | Length (nt) | SEQ ID NO |
|---|---|---|---|
| Human | premRNA | 505425 | 1 |
| Human | mRNA | 5789 | 2 |
| Human | mRNA | 5796 | 3 |
| Human | mRNA | 4390 | 4 |
| Human | mRNA | 9118 | 5 |
| Human | mRNA | 550 | 6 |
| Human | mRNA | 546 | 7 |
| Human | mRNA | 9241 | 8 |
| Human | mRNA | 9202 | 9 |
| Human | mRNA | 868 | 10 |
| Human | mRNA | 2832 | 11 |
| Human | mRNA | 1275 | 12 |
| Cyno | premRNA | 569392 | 13 |

Note
SEQ ID NO 13 comprises regions of multiple NNNNs, where the sequencing has been unable to accurately refine the sequence, and a degenerate sequence is therefore included. For the avoidance of doubt the compounds of the invention are complementary to the actual target sequence and are not therefore degenerate compounds

### Target Sequence

[0057] The term “target sequence” as used herein refers to a sequence of nucleotides present in the target nucleic acid, which comprises the nucleobase sequence, which is complementary to the antisense oligonucleotide of the invention. In some embodiments, the target sequence consists of a region on the target nucleic acid, which is complementary to the contiguous nucleotide sequence of the antisense oligonucleotide of the invention. This region of the target nucleic acid may be referred to as the target nucleotide sequence. In some embodiments the target sequence is longer than the contiguous complementary sequence of a single oligonucleotide, and may, for example represent a preferred region of the target nucleic acid which may be targeted by several oligonucleotides of the invention.

[0058] The antisense oligonucleotide of the invention comprises a contiguous nucleotide sequence, which is complementary to the target nucleic acid, such as a target sequence described herein.

[0059] In some embodiments the target sequence is conserved between human and monkey, in particular a sequence that is present in both SEQ ID NO: 1 and SEQ ID NO: 13. In a preferred embodiment, the target sequence is present in SEQ ID NO: 14.

[0060] The target sequence to which the oligonucleotide is complementary generally comprises a contiguous nucleobase sequence of at least 10 nucleotides. The contiguous nucleotide sequence is between 10 to 50 nucleotides, such as 12 to 30, such as 14 to 20, such as 15 to 18 contiguous nucleotides

[0061] In one embodiment of the invention the target sequence is SEQ ID NO: 14.

[0062] In another embodiment of the invention the target sequence is SEQ ID NO: 23.

[0063] In another embodiment of the invention the target sequence is SEQ ID NO: 24.

[0064] In another embodiment of the invention the target sequence is SEQ ID NO: 25.

[0065] In another embodiment of the invention the target sequence is SEQ ID NO: 26.

### Repeated Target Region

[0066] The target region or target sequence can be unique for the target nucleic acid (only present once).

[0067] In some aspects of the invention the target region is repeated at least two times over the span of target nucleic acid. Repeated as encompassed by the present invention means that there are at least two identical nucleotide sequences (target regions) of at least 10, such as at least 11, or at least 12, nucleotides in length which occur in the target nucleic acid at different positions. Each repeated target region is separated from the identical region by at least one nucleobase on the contiguous sequence of target nucleic acid and is positioned at different and non-overlapping positions within the target nucleic acid.

### Target Cell

[0068] The term a “target cell” as used herein refers to a cell which is expressing the target nucleic acid. In some embodiments the target cell may be in vivo or in vitro. In some embodiments the target cell is a mammalian cell such as a rodent cell, such as a mouse cell or a rat cell, or a primate cell such as a monkey cell or a human cell.

[0069] In some preferred embodiments the target cell expresses ERC1 mRNA, such as the ERC1 pre-mRNA or ERC1 mature mRNA. The poly A tail of ERC1 mRNA is typically disregarded for antisense oligonucleotide targeting.

### Naturally Occurring Variant

[0070] The term “naturally occurring variant” refers to variants of ERC1 gene or transcripts which originate from the same genetic loci as the target nucleic acid and is a directional transcript from the same chromosomal position and direction as the target nucleic acid, but may differ for example, by virtue of degeneracy of the genetic code causing a multiplicity of codons encoding the same amino acid, or due to alternative splicing of pre-mRNA, or the presence of polymorphisms, such as single nucleotide polymorphisms, and allelic variants. Based on the presence of the sufficient complementary sequence to the oligonucleotide, the oligonucleotide of the invention may therefore target the target nucleic acid and naturally occurring variants thereof.

[0071] In some embodiments, the naturally occurring variants have at least 95% such as at least 98% or at least 99% homology to a mammalian ERC1 target nucleic acid, such as a target nucleic acid selected form the group consisting of SEQ ID NO: 1, 2, 3, 4, 5, 6, 7, 8, 9, 10, 11, 12 13 and 14 (or any other pre-mRNA or mRNAs disclosed herein).

### Modulation of Expression

[0072] The term “modulation of expression” as used herein is to be understood as an overall term for an oligonucleotide's ability to alter the amount of ERC1 when compared to the amount of ERC1 before administration of the oligonucleotide. Alternatively modulation of expression may be determined by reference to a control experiment. It is generally understood that the control is an individual or target cell treated with a saline composition or an individual or target cell treated with a non-targeting oligonucleotide (mock). It is generally understood that the control is a target cell treated with a saline composition or a target cell treated with a non-targeting oligonucleotide (mock).

[0073] A modulation according to the present invention shall be understood as an antisense oligonuclleotide's ability to inhibit, down-regulate, reduce, suppress, remove, stop, block, prevent, lessen, lower, avoid or terminate expression of ERC1, e.g. by degradation of mRNA or blockage of transcription.

### High Affinity Modified Nucleosides

[0074] A high affinity modified nucleoside is a modified nucleotide which, when incorporated into the oligonucleotide enhances the affinity of the oligonucleotide for its complementary target, for example as measured by the melting temperature (T^{m}). A high affinity modified nucleoside of the present invention preferably result in an increase in melting temperature between +0.5 to +12° C., more preferably between +1.5 to +10° C. and most preferably between +3 to +8° C. per modified nucleoside. Numerous high affinity modified nucleosides are known in the art and include for example, many 2′ substituted nucleosides as well as locked nucleic acids (LNA) (see e.g. Freier & Altmann; Nucl. Acid Res., 1997, 25, 4429-4443 and Uhlmann; Curr. Opinion in Drug Development, 2000, 3(2), 293-213).

### Sugar Modifications

[0075] The oligomer of the invention may comprise one or more nucleosides which have a modified sugar moiety, i.e. a modification of the sugar moiety when compared to the ribose sugar moiety found in DNA and RNA.

[0076] Numerous nucleosides with modification of the ribose sugar moiety have been made, primarily with the aim of improving certain properties of oligonucleotides, such as affinity and/or nuclease resistance.

[0077] Such modifications include those where the ribose ring structure is modified, e.g. by replacement with a hexose ring (HNA), or a bicyclic ring, which typically have a biradicle bridge between the C2 and C4 carbons on the ribose ring (LNA), or an unlinked ribose ring which typically lacks a bond between the C2 and C3 carbons (e.g. UNA). Other sugar modified nucleosides include, for example, bicyclohexose nucleic acids (WO2011/017521) or tricyclic nucleic acids (WO2013/154798). Modified nucleosides also include nucleosides where the sugar moiety is replaced with a non-sugar moiety, for example in the case of peptide nucleic acids (PNA), or morpholino nucleic acids.

[0078] Sugar modifications also include modifications made via altering the substituent groups on the ribose ring to groups other than hydrogen, or the 2′—OH group naturally found in DNA and RNA nucleosides. Substituents may, for example be introduced at the 2′, 3′, 4′ or 5′ positions.

[0079] Nucleosides with modified sugar moieties also include 2′ modified nucleosides, such as 2′ substituted nucleosides. Indeed, much focus has been spent on developing 2′ substituted nucleosides, and numerous 2′ substituted nucleosides have been found to have beneficial properties when incorporated into oligonucleotides, such as enhanced nucleoside resistance and enhanced affinity.

### 2′ Sugar Modified Nucleosides.

[0080] A 2′ sugar modified nucleoside is a nucleoside which has a substituent other than H or —OH at the 2′ position (2′ substituted nucleoside) or comprises a 2′ linked biradicle capable of forming a bridge between the 2′ carbon and a second carbon in the ribose ring, such as LNA (2′-4′ biradicle bridged) nucleosides.

[0081] Indeed, much focus has been spent on developing 2′ sugar substituted nucleosides, and numerous 2′ substituted nucleosides have been found to have beneficial properties when incorporated into oligonucleotides. Examples of 2′ substituted modified nucleosides are 2′-O-alkyl-RNA, 2′-O-methyl-RNA, 2′-alkoxy-RNA, 2′-O-methoxyethyl-RNA (MOE), 2′-amino-DNA, 2′-Fluoro-RNA, and 2′-F-ANA nucleoside. For further examples, please see e.g. Freier & Altmann; Nucl. Acid Res., 1997, 25, 4429-4443 and Uhlmann; Curr. Opinion in Drug Development, 2000, 3(2), 293-213, and Deleavey and Damha, Chemistry and Biology 2012, 19, 937. Below are illustrations of some 2′ substituted modified nucleosides.

[chemical structure]

### Locked Nucleic Acid Nucleosides (LNA).

[0082] A “LNA nucleoside” is a 2′-modified nucleoside which comprises a biradical linking the C2′ and C4′ of the ribose sugar ring of said nucleoside (also referred to as a “2′-4′ bridge”), which restricts or locks the conformation of the ribose ring. These nucleosides are also termed bridged nucleic acid or bicyclic nucleic acid (BNA) in the literature. The locking of the conformation of the ribose is associated with an enhanced affinity of hybridization (duplex stabilization) when the LNA is incorporated into an oligonucleotide for a complementary RNA or DNA molecule. This can be routinely determined by measuring the melting temperature of the oligonucleotide/complement duplex.

[0083] Non limiting, exemplary LNA nucleosides are disclosed in WO 99/014226, WO 00/66604, WO 98/039352, WO 2004/046160, WO 00/047599, WO 2007/134181, WO 2010/077578, WO 2010/036698, WO 2007/090071, WO 2009/006478, WO 2011/156202, WO 2008/154401, WO 2009/067647, WO 2008/150729, Morita et al., Bioorganic & Med. Chem. Lett. 12, 73-76, Seth et al. J. Org. Chem. 2010, Vol 75(5) pp. 1569-81 and Mitsuoka et al., Nucleic Acids Research 2009, 37(4), 1225-1238.

[0084] The 2′-4′ bridge comprises 2 to 4 bridging atoms and is in particular of formula —X—Y—, X being linked to C4′ and Y linked to C2′,
[0085] wherein
[0086] X is oxygen, sulfur, —CR^{a}R^{b}—, —C(R^{a})═C(R^{b})—, —C(═CR^{a}R^{b})—, —C(R^{a})═N—, —Si(R^{a})₂—, —SO₂—, —NR^{a}—; —O—NR^{a}—, —NR^{a}—O—, —C(=J)-, Se, —O—NR^{a}—, —NR^{a}—CR^{a}R^{b}—, —N(R^{a})—O— or —O—CR^{a}R^{b}—
[0087] Y is oxygen, sulfur, —(CR^{a}R^{b})ₙ—, —CR^{a}R^{b}—O—CR^{a}R^{b}—, —C(R^{a})═C(R^{b})—, —C(R^{a})═N—, —Si(R^{a})₂—, —SO₂—, —NR^{a}—, —C(=J)-, Se, —O—NR^{a}—, —NR^{a}—CR^{a}R^{b}—, —N(R^{a})—O— or —O—CR^{a}R^{b}—;
[0088] with the proviso that —X—Y— is not —O—O—, Si(R^{a})₂—Si(R^{a})₂—, —SO₂—SO₂—, —C(R^{a})═C(R^{b})—C(R^{a})═C(R^{b}), —C(R^{a})═N—C(R^{a})═N—, —C(R^{a})═N—C(R^{a})═C(R^{b}), —C(R^{a})═C(R^{b})—C(R^{a})═N— or —Se—Se—;
[0089] J is oxygen, sulfur, ═CH₂ or ═N(R^{a});
[0090] R^{a} and R^{b} are independently selected from hydrogen, halogen, hydroxyl, cyano, thiohydroxyl, alkyl, substituted alkyl, alkenyl, substituted alkenyl, alkynyl, substituted alkynyl, alkoxy, substituted alkoxy, alkoxyalkyl, alkenyloxy, carboxyl, alkoxycarbonyl, alkylcarbonyl, formyl, aryl, heterocyclyl, amino, alkylamino, carbamoyl, alkylaminocarbonyl, aminoalkylaminocarbonyl, alkylaminoalkylaminocarbonyl, alkylcarbonylamino, carbamido, alkanoyloxy, sulfonyl, alkylsulfonyloxy, nitro, azido, thiohydroxylsulfidealkylsulfanyl, aryloxycarbonyl, aryloxy, arylcarbonyl, heteroaryl, heteroaryloxycarbonyl, heteroaryloxy, heteroarylcarbonyl, —OC(═X^{a})R^{c}, —OC(═X^{a})R^{c}R^{d} and —NR^{e}C(═X^{a})R^{c}R^{d};
[0091] or two geminal R^{a} and R^{b} together form optionally substituted methylene;
[0092] or two geminal R^{a} and R^{b}, together with the carbon atom to which they are attached, form cycloalkyl or halocycloalkyl, with only one carbon atom of —X—Y—;
[0093] wherein substituted alkyl, substituted alkenyl, substituted alkynyl, substituted alkoxy and substituted methylene are alkyl, alkenyl, alkynyl and methylene substituted with 1 to 3 substituents independently selected from halogen, hydroxyl, alkyl, alkenyl, alkynyl, alkoxy, alkoxyalkyl, alkenyloxy, carboxyl, alkoxycarbonyl, alkylcarbonyl, formyl, heterocylyl, aryl and heteroaryl;
[0094] X^{a} is oxygen, sulfur or —NR^{c};
[0095] R^{c}, R^{d} and R^{e} are independently selected from hydrogen and alkyl; and
[0096] n is 1, 2 or 3.

[0097] In a further particular embodiment of the invention, X is oxygen, sulfur, —NR^{a}—, —CR^{a}R^{b}— or —C(═CR^{a}R^{b})—, particularly oxygen, sulfur, —NH—, —CH₂— or —C(═CH₂)—, more particularly oxygen.

[0098] In another particular embodiment of the invention, Y is —CR^{a}R^{b}—, —CR^{a}R^{b}—CR^{a}R^{b}— or —CR^{a}R^{b}—, —CR^{a}R^{b}—CR^{a}R^{b}—, particularly —CH₂—CHCH₃—, —CHCH₃—CH₂—, —CH₂—CH₂— or —CH₂—CH₂—CH₂—.

[0099] In a particular embodiment of the invention, —X—Y— is —O—(CR^{a}R^{b})ₙ—, —S—CR^{a}R^{b}—, —N(R^{a})CR^{a}R^{b}—, —CR^{a}R^{b}—CR^{a}R^{b}—, —O—CR^{a}R^{b}—O—CR^{a}R^{b}—, —CR^{a}R^{b}—O—CR^{a}R^{b}—, —C(═CR^{a}R^{b})—CR^{a}R^{b}—, —N(R^{a})(CR^{a}R^{b}—, —O—N(R^{a})—CR^{a}R^{b}— or —N(R^{a})—O—CR^{a}R^{b}—.

[0100] In a particular embodiment of the invention, R^{a} and R^{b} are independently selected from the group consisting of hydrogen, halogen, hydroxyl, alkyl and alkoxyalkyl, in particular hydrogen, halogen, alkyl and alkoxyalkyl.

[0101] In another embodiment of the invention, R^{a} and R^{b} are independently selected from the group consisting of hydrogen, fluoro, hydroxyl, methyl and —CH₂—O—CH₃, in particular hydrogen, fluoro, methyl and —CH₂—O—CH₃.

[0102] Advantageously, one of R^{a} and R^{b} of —X—Y— is as defined above and the other ones are all hydrogen at the same time.

[0103] In a further particular embodiment of the invention, R^{a} is hydrogen or alkyl, in particular hydrogen or methyl.

[0104] In another particular embodiment of the invention, R^{b} is hydrogen or or alkyl, in particular hydrogen or methyl.

[0105] In a particular embodiment of the invention, one or both of R^{a} and R^{b} are hydrogen.

[0106] In a particular embodiment of the invention, only one of R^{a} and R^{b} is hydrogen.

[0107] In one particular embodiment of the invention, one of R^{a} and R^{b} is methyl and the other one is hydrogen.

[0108] In a particular embodiment of the invention, R^{a} and R^{b} are both methyl at the same time.

[0109] In a particular embodiment of the invention, —X—Y— is —O—CH₂—, —S—CH₂—, —S—CH(CH₃)—, —NH—CH₂—, —O—CH₂CH₂—, —O—CH(CH₂—O—CH₃)—, —O—CH(CH₂CH₃)—, —O—CH(CH₃)—, —O—CH₂O—CH₂—, —O—CH₂—O—CH₂—, —CH₂—O—CH₂—, —C(═CH₂)CH₂—, —C(═CH₂)CH(CH₃)—, —N(OCH₃)CH₂— or —N(CH₃)CH₂—;

[0110] In a particular embodiment of the invention, —X—Y— is —O—CR^{a}R^{b}— wherein R^{a} and R^{b} are independently selected from the group consisting of hydrogen, alkyl and alkoxyalkyl, in particular hydrogen, methyl and —CH₂—O—CH₃.

[0111] In a particular embodiment, —X—Y— is —O—CH₂— or —O—CH(CH₃)—, particularly —O—CH₂—.

[0112] The 2′-4′ bridge may be positioned either below the plane of the ribose ring (beta-D-configuration), or above the plane of the ring (alpha-L- configuration), as illustrated in formula (A) and formula (B) respectively.

[0113] The LNA nucleoside according to the invention is in particular of formula (A) or (B)

[chemical structure]

[0114] wherein
[0115] W is oxygen, sulfur, —N(R^{a})— or —CR^{a}R^{b}—, in particular oxygen;
[0116] B is a nucleobase or a modified nucleobase;
[0117] Z is an internucleoside linkage to an adjacent nucleoside or a 5′-terminal group;
[0118] Z* is an internucleoside linkage to an adjacent nucleoside or a 3′-terminal group;
[0119] R¹, R², R³, R⁵ and R^{5*} are independently selected from hydrogen, halogen, alkyl, haloalkyl, alkenyl, alkynyl, hydroxy, alkoxy, alkoxyalkyl, azido, alkenyloxy, carboxyl, alkoxycarbonyl, alkylcarbonyl, formyl and aryl; and
[0120] X, Y, R^{a} and R^{b} are as defined above.

[0121] In a particular embodiment, in the definition of —X—Y—, R^{a} is hydrogen or alkyl, in particular hydrogen or methyl. In another particular embodiment, in the definition of —X—Y—, R^{b} is hydrogen or alkyl, in particular hydrogen or methyl. In a further particular embodiment, in the definition of —X—Y—, one or both of R^{a} and R^{b} are hydrogen. In a particular embodiment, in the definition of —X—Y—, only one of R^{a} and R^{b} is hydrogen. In one particular embodiment, in the definition of —X—Y—, one of R^{a} and R^{b} is methyl and the other one is hydrogen. In a particular embodiment, in the definition of —X—Y—, R^{a} and R^{b} are both methyl at the same time.

[0122] In a further particular embodiment, in the definition of X, R^{a} is hydrogen or alkyl, in particular hydrogen or methyl. In another particular embodiment, in the definition of X, R^{b} is hydrogen or alkyl, in particular hydrogen or methyl. In a particular embodiment, in the definition of X, one or both of R^{a} and R^{b} are hydrogen. In a particular embodiment, in the definition of X, only one of R^{a} and R^{b} is hydrogen. In one particular embodiment, in the definition of X, one of R^{a} and R^{b} is methyl and the other one is hydrogen. In a particular embodiment, in the definition of X, R^{a} and R^{b} are both methyl at the same time.

[0123] In a further particular embodiment, in the definition of Y, R^{a} is hydrogen or alkyl, in particular hydrogen or methyl. In another particular embodiment, in the definition of Y, R^{b} is hydrogen or alkyl, in particular hydrogen or methyl. In a particular embodiment, in the definition of Y, one or both of R^{a} and R^{b} are hydrogen. In a particular embodiment, in the definition of Y, only one of R^{a} and R^{b} is hydrogen. In one particular embodiment, in the definition of Y, one of R^{a} and R^{b} is methyl and the other one is hydrogen. In a particular embodiment, in the definition of Y, R^{a} and R^{b} are both methyl at the same time.

[0124] In a particular embodiment of the invention R¹, R², R³, R⁵ and R^{5*} are independently selected from hydrogen and alkyl, in particular hydrogen and methyl.

[0125] In a further particular advantageous embodiment of the invention, R¹, R², R³, R⁵ and R^{5*} are all hydrogen at the same time.

[0126] In another particular embodiment of the invention, R¹, R², R³, are all hydrogen at the same time, one of R⁵ and R^{5*} is hydrogen and the other one is as defined above, in particular alkyl, more particularly methyl.

[0127] In a particular embodiment of the invention, R⁵ and R^{5*} are independently selected from hydrogen, halogen, alkyl, alkoxyalkyl and azido, in particular from hydrogen, fluoro, methyl, methoxyethyl and azido. In particular advantageous embodiments of the invention, one of R⁵ and R^{5*} is hydrogen and the other one is alkyl, in particular methyl, halogen, in particular fluoro, alkoxyalkyl, in particular methoxyethyl or azido; or R⁵ and R^{5*} are both hydrogen or halogen at the same time, in particular both hydrogen of fluoro at the same time. In such particular embodiments, W can advantageously be oxygen, and —X—Y— advantageously —O—CH₂—.

[0128] In a particular embodiment of the invention, —X—Y— is —O—CH₂—, W is oxygen and R¹, R², R³, R⁵ and R^{5*} are all hydrogen at the same time. Such LNA nucleosides are disclosed in WO 99/014226, WO 00/66604, WO 98/039352 and WO 2004/046160 which are all hereby incorporated by reference, and include what are commonly known in the art as beta-D-oxy LNA and alpha-L-oxy LNA nucleosides.

[0129] In another particular embodiment of the invention, —X—Y— is —S—CH₂—, W is oxygen and R¹, R², R³, R⁵ and R^{5*} are all hydrogen at the same time. Such thio LNA nucleosides are disclosed in WO 99/014226 and WO 2004/046160 which are hereby incorporated by reference.

[0130] In another particular embodiment of the invention, —X—Y— is —NH—CH₂—, W is oxygen and R¹, R², R³, R⁵ and R^{5*} are all hydrogen at the same time. Such amino LNA nucleosides are disclosed in WO 99/014226 and WO 2004/046160 which are hereby incorporated by reference.

[0131] In another particular embodiment of the invention, —X—Y— is —O—CH₂CH₂— or —OCH₂CH₂CH₂—, W is oxygen, and R¹, R², R³, Wand R^{5*} are all hydrogen at the same time. Such LNA nucleosides are disclosed in WO 00/047599 and Morita et al., Bioorganic & Med. Chem. Lett. 12, 73-76, which are hereby incorporated by reference, and include what are commonly known in the art as 2′-O-4′C-ethylene bridged nucleic acids (ENA).

[0132] In another particular embodiment of the invention, —X—Y— is —O—CH₂—, W is oxygen, R¹, R², R³ are all hydrogen at the same time, one of R⁵ and R^{5*} is hydrogen and the other one is not hydrogen, such as alkyl, for example methyl. Such 5′ substituted LNA nucleosides are disclosed in WO 2007/134181 which is hereby incorporated by reference.

[0133] In another particular embodiment of the invention, —X—Y— is —O—CR^{a}R^{b}—, wherein one or both of R^{a} and R^{b} are not hydrogen, in particular alkyl such as methyl, W is oxygen, R¹, R², R³ are all hydrogen at the same time, one of R⁵ and R^{5*} is hydrogen and the other one is not hydrogen, in particular alkyl, for example methyl. Such bis modified LNA nucleosides are disclosed in WO 2010/077578 which is hereby incorporated by reference.

[0134] In another particular embodiment of the invention, —X—Y— is —O—CHR^{a}—, W is oxygen and R¹, R², R³, R⁵ and R^{5*} are all hydrogen at the same time. Such 6′-substituted LNA nucleosides are disclosed in WO 2010/036698 and WO 2007/090071 which are both hereby incorporated by reference. In such 6′-substituted LNA nucleosides, R^{a} is in particular C₁-C₆ alkyl, such as methyl.

[0135] In another particular embodiment of the invention, —X—Y— is —O—CH(CH₂—O—CH₃)— (“2′ O-methoxyethyl bicyclic nucleic acid”, Seth et al. J. Org. Chem. 2010, Vol 75(5) pp. 1569-81).

[0136] In another particular embodiment of the invention, —X—Y— is —O—CH(CH₂CH₃)— (“2′O-ethyl bicyclic nucleic acid”, Seth at al., J. Org. Chem. 2010, Vol 75(5) pp. 1569-81).

[0137] In another particular embodiment of the invention, —X—Y— is —O—CH(CH₂—O—CH₃)—, W is oxygen and R¹, R², R³, R⁵ and R^{5*} are all hydrogen at the same time. Such LNA nucleosides are also known in the art as cyclic MOEs (cMOE) and are disclosed in WO 2007/090071.

[0138] In another particular embodiment of the invention, —X—Y— is —O—CH(CH₃)—.

[0139] In another particular embodiment of the invention, —X—Y— is —O—CH_{2—}O—CH₂— (Seth et al., J. Org. Chem 2010 op. cit.)

[0140] In another particular embodiment of the invention, —X—Y— is —O—CH(CH₃)—, W is oxygen and R¹, R², R³, R⁵ and R^{5*} are all hydrogen at the same time. Such 6′-methyl LNA nucleosides are also known in the art as cET nucleosides, and may be either (S)-cET or (R)-cET diastereoisomers, as disclosed in WO 2007/090071 (beta-D) and WO 2010/036698 (alpha-L) which are both hereby incorporated by reference.

[0141] In another particular embodiment of the invention, —X—Y— is —O—CR^{a}R^{b}—, wherein neither R^{a} nor R^{b} is hydrogen, W is oxygen and R¹, R², R³, R⁵ and R^{5′} are all hydrogen at the same time. In a particular embodiment, R^{a} and R^{b} are both alkyl at the same time, in particular both methyl at the same time. Such 6′-di-substituted LNA nucleosides are disclosed in WO 2009/006478 which is hereby incorporated by reference.

[0142] In another particular embodiment of the invention, —X—Y— is —S—CHR^{a}—, W is oxygen and R¹, R², R³, R⁵ and R^{5*} are all hydrogen at the same time. Such 6′-substituted thio LNA nucleosides are disclosed in WO 2011/156202 which is hereby incorporated by reference. In a particular embodiment of such 6′-substituted thio LNA, R^{a} is alkyl, in particular methyl.

[0143] In a particular embodiment of the invention, —X—Y— is —C(═CH₂)C(R^{a}R^{b})—, —C(═CHF)C(R^{a}R^{b})— or —C(═CF₂)C(R^{a}R^{b})—, W is oxygen and R¹, R², R³, R⁵ and R^{5*} are all hydrogen at the same time. R^{a} and R^{b} are advantagesously independently selected from hydrogen, halogen, alkyl and alkoxyalkyl, in particular hydrogen, methyl, fluoro and methoxymethyl. R^{a} and R^{b} are in particular both hydrogen or methyl at the same time or one of R^{a} and R^{b} is hydrogen and the other one is methyl. Such vinyl carbo LNA nucleosides are disclosed in WO 2008/154401 and WO 2009/067647 which are both hereby incorporated by reference.

[0144] In a particular embodiment of the invention, —X—Y— is —N(OR^{a})—CH₂—, W is oxygen and R¹, R², R³, R⁵ and R^{5*} are all hydrogen at the same time. In a particular embodiment, R^{a} is alkyl such as methyl. Such LNA nucleosides are also known as N substituted LNAs and are disclosed in WO 2008/150729 which is hereby incorporated by reference.

[0145] In a particular embodiment of the invention, —X—Y— is —O—N(R^{a})—, —N(R^{a})—O—, —NR^{a}—CR^{a}R^{b}—CR^{a}R^{b}— or —NR^{a}—CR^{a}R^{b}—, W is oxygen and R¹, R², R³, R⁵ and R^{5*} are all hydrogen at the same time. R^{a} and R^{b} are advantagesously independently selected from hydrogen, halogen, alkyl and alkoxyalkyl, in particular hydrogen, methyl, fluoro and methoxymethyl. In a particular embodiment, R^{a} is alkyl, such as methyl, R^{b} is hydrogen or methyl, in particular hydrogen. (Seth et al., J. Org. Chem 2010 op. cit.).

[0146] In a particular embodiment of the invention, —X—Y— is —O—N(CH₃)— (Seth et al., J. Org. Chem 2010 op. cit.).

[0147] In a particular embodiment of the invention, R⁵ and R^{5*} are both hydrogen at the same time. In another particular embodiment of the invention, one of R⁵ and R^{5*} is hydrogen and the other one is alkyl, such as methyl. In such embodiments, R¹, R² and R³ can be in particular hydrogen and —X—Y— can be in particular —O—CH₂— or —O—CHC(R^{a})₃—, such as —O—CH(CH₃)—.

[0148] In a particular embodiment of the invention, —X—Y— is —CR^{a}R^{b}—O—CR^{a}R^{b}—, such as —CH₂—O—CH₂—, W is oxygen and R¹, R², R³, R⁵ and R^{5*} are all hydrogen at the same time. In such particular embodiments, R^{a} can be in particular alkyl such as methyl, R^{b} hydrogen or methyl, in particular hydrogen. Such LNA nucleosides are also known as conformationally restricted nucleotides (CRNs) and are disclosed in WO 2013/036868 which is hereby incorporated by reference.

[0149] In a particular embodiment of the invention, —X—Y— is —O—CR^{a}R^{b}—O—CR^{a}R^{b}—, such as —O—CH₂—O—CH₂—, W is oxygen and R¹, R², R³, R⁵ and R^{5*} are all hydrogen at the same time. R^{a} and R^{b} are advantageously independently selected from hydrogen, halogen, alkyl and alkoxyalkyl, in particular hydrogen, methyl, fluoro and methoxymethyl. In such a particular embodiment, R^{a} can be in particular alkyl such as methyl, R^{b} hydrogen or methyl, in particular hydrogen. Such LNA nucleosides are also known as COC nucleotides and are disclosed in Mitsuoka et al., Nucleic Acids Research 2009, 37(4), 1225-1238, which is hereby incorporated by reference.

[0150] It will be recognized that, unless specified, the LNA nucleosides may be in the beta-D or alpha-L stereoisoform.

[0151] Particular examples of LNA nucleosides of the invention are presented in Scheme 1 (wherein B is as defined above).

[chemical structure]

[chemical structure]

[0152] Particular LNA nucleosides are beta-D-oxy-LNA, 6′-methyl-beta-D-oxy LNA such as (S)-6′-methyl-beta-D-oxy-LNA (ScET) and ENA.

[0153] If one of the starting materials or compounds of the invention contain one or more functional groups which are not stable or are reactive under the reaction conditions of one or more reaction steps, appropriate protecting groups (as described e.g. in “Protective Groups in Organic Chemistry” by T. W. Greene and P. G. M. Wuts, 3rd Ed., 1999, Wiley, New York) can be introduced before the critical step applying methods well known in the art. Such protecting groups can be removed at a later stage of the synthesis using standard methods described in the literature. Examples of protecting groups are tert-butoxycarbonyl (Boc), 9-fluorenylmethyl carbamate (Fmoc), 2-trimethylsilylethyl carbamate (Teoc), carbobenzyloxy (Cbz) and p-methoxybenzyloxycarbonyl (Moz).

[0154] The compounds described herein can contain several asymmetric centers and can be present in the form of optically pure enantiomers, mixtures of enantiomers such as, for example, racemates, mixtures of diastereoisomers, diastereoisomeric racemates or mixtures of diastereoisomeric racemates.

[0155] The term “asymmetric carbon atom” means a carbon atom with four different substituents. According to the Cahn-Ingold-Prelog Convention an asymmetric carbon atom can be of the “R” or “S” configuration.

### Chemical Group Definitions

[0156] In the present description the term “alkyl”, alone or in combination, signifies a straight-chain or branched-chain alkyl group with 1 to 8 carbon atoms, particularly a straight or branched-chain alkyl group with 1 to 6 carbon atoms and more particularly a straight or branched-chain alkyl group with 1 to 4 carbon atoms. Examples of straight-chain and branched-chain C₁-C₈ alkyl groups are methyl, ethyl, propyl, isopropyl, butyl, isobutyl, tert.-butyl, the isomeric pentyls, the isomeric hexyls, the isomeric heptyls and the isomeric octyls, particularly methyl, ethyl, propyl, butyl and pentyl. Particular examples of alkyl are methyl, ethyl and propyl.

[0157] The term “cycloalkyl”, alone or in combination, signifies a cycloalkyl ring with 3 to 8 carbon atoms and particularly a cycloalkyl ring with 3 to 6 carbon atoms. Examples of cycloalkyl are cyclopropyl, cyclobutyl, cyclopentyl, cyclohexyl, cycloheptyl and cyclooctyl, more particularly cyclopropyl and cyclobutyl. A particular example of “cycloalkyl” is cyclopropyl.

[0158] The term “alkoxy”, alone or in combination, signifies a group of the formula alkyl-O— in which the term “alkyl” has the previously given significance, such as methoxy, ethoxy, n-propoxy, isopropoxy, n-butoxy, isobutoxy, sec.butoxy and tert.butoxy. Particular “alkoxy” are methoxy and ethoxy. Methoxyethoxy is a particular example of “alkoxyalkoxy”.

[0159] The term “oxy”, alone or in combination, signifies the —O— group.

[0160] The term “alkenyl”, alone or in combination, signifies a straight-chain or branched hydrocarbon residue comprising an olefinic bond and up to 8, preferably up to 6, particularly preferred up to 4 carbon atoms. Examples of alkenyl groups are ethenyl, 1-propenyl, 2-propenyl, isopropenyl, 1-butenyl, 2-butenyl, 3-butenyl and isobutenyl.

[0161] The term “alkynyl”, alone or in combination, signifies a straight-chain or branched hydrocarbon residue comprising a triple bond and up to 8, preferably up to 6, particularly preferred up to 4 carbon atoms.

[0162] The terms “halogen” or “halo”, alone or in combination, signifies fluorine, chlorine, bromine or iodine and particularly fluorine, chlorine or bromine, more particularly fluorine. The term “halo”, in combination with another group, denotes the substitution of said group with at least one halogen, particularly substituted with one to five halogens, particularly one to four halogens, i.e. one, two, three or four halogens.

[0163] The term “haloalkyl”, alone or in combination, denotes an alkyl group substituted with at least one halogen, particularly substituted with one to five halogens, particularly one to three halogens. Examples of haloalkyl include monofluoro-, difluoro- or trifluoro-methyl, -ethyl or -propyl, for example 3,3,3-trifluoropropyl, 2-fluoroethyl, 2,2,2-trifluoroethyl, fluoromethyl or trifluoromethyl. Fluoromethyl, difluoromethyl and trifluoromethyl are particular “haloalkyl”.

[0164] The term “halocycloalkyl”, alone or in combination, denotes a cycloalkyl group as defined above substituted with at least one halogen, particularly substituted with one to five halogens, particularly one to three halogens. Particular example of “halocycloalkyl” are halocyclopropyl, in particular fluorocyclopropyl, difluorocyclopropyl and trifluorocyclopropyl.

[0165] The terms “hydroxyl” and “hydroxy”, alone or in combination, signify the —OH group.

[0166] The terms “thiohydroxyl” and “thiohydroxy”, alone or in combination, signify the —SH group.

[0167] The term “carbonyl”, alone or in combination, signifies the —C(O)— group.

[0168] The term “carboxy” or “carboxyl”, alone or in combination, signifies the —COOH group.

[0169] The term “amino”, alone or in combination, signifies the primary amino group (—NH₂), the secondary amino group (—NH—), or the tertiary amino group (—N—).

[0170] The term “alkylamino”, alone or in combination, signifies an amino group as defined above substituted with one or two alkyl groups as defined above.

[0171] The term “sulfonyl”, alone or in combination, means the —SO₂ group.

[0172] The term “sulfinyl”, alone or in combination, signifies the —SO— group.

[0173] The term “sulfanyl”, alone or in combination, signifies the —S— group.

[0174] The term “cyano”, alone or in combination, signifies the —CN group.

[0175] The term “azido”, alone or in combination, signifies the —N₃ group.

[0176] The term “nitro”, alone or in combination, signifies the NO₂ group.

[0177] The term “formyl”, alone or in combination, signifies the —C(O)H group.

[0178] The term “carbamoyl”, alone or in combination, signifies the —C(O)NH₂ group.

[0179] The term “cabamido”, alone or in combination, signifies the —NH—C(O)—NH₂ group.

[0180] The term “aryl”, alone or in combination, denotes a monovalent aromatic carbocyclic mono- or bicyclic ring system comprising 6 to 10 carbon ring atoms, optionally substituted with 1 to 3 substituents independently selected from halogen, hydroxyl, alkyl, alkenyl, alkynyl, alkoxy, alkoxyalkyl, alkenyloxy, carboxyl, alkoxycarbonyl, alkylcarbonyl and formyl. Examples of aryl include phenyl and naphthyl, in particular phenyl.

[0181] The term “heteroaryl”, alone or in combination, denotes a monovalent aromatic heterocyclic mono- or bicyclic ring system of 5 to 12 ring atoms, comprising 1, 2, 3 or 4 heteroatoms selected from N, O and S, the remaining ring atoms being carbon, optionally substituted with 1 to 3 substituents independently selected from halogen, hydroxyl, alkyl, alkenyl, alkynyl, alkoxy, alkoxyalkyl, alkenyloxy, carboxyl, alkoxycarbonyl, alkylcarbonyl and formyl. Examples of heteroaryl include pyrrolyl, furanyl, thienyl, imidazolyl, oxazolyl, thiazolyl, triazolyl, oxadiazolyl, thiadiazolyl, tetrazolyl, pyridinyl, pyrazinyl, pyrazolyl, pyridazinyl, pyrimidinyl, triazinyl, azepinyl, diazepinyl, isoxazolyl, benzofuranyl, isothiazolyl, benzothienyl, indolyl, isoindolyl, isobenzofuranyl, benzimidazolyl, benzoxazolyl, benzoisoxazolyl, benzothiazolyl, benzoisothiazolyl, benzooxadiazolyl, benzothiadiazolyl, benzotriazolyl, purinyl, quinolinyl, isoquinolinyl, quinazolinyl, quinoxalinyl, carbazolyl or acridinyl.

[0182] The term “heterocyclyl”, alone or in combination, signifies a monovalent saturated or partly unsaturated mono- or bicyclic ring system of 4 to 12, in particular 4 to 9 ring atoms, comprising 1, 2, 3 or 4 ring heteroatoms selected from N, O and S, the remaining ring atoms being carbon, optionally substituted with 1 to 3 substituents independently selected from halogen, hydroxyl, alkyl, alkenyl, alkynyl, alkoxy, alkoxyalkyl, alkenyloxy, carboxyl, alkoxycarbonyl, alkylcarbonyl and formyl. Examples for monocyclic saturated heterocyclyl are azetidinyl, pyrrolidinyl, tetrahydrofuranyl, tetrahydro-thienyl, pyrazolidinyl, imidazolidinyl, oxazolidinyl, isoxazolidinyl, thiazolidinyl, piperidinyl, tetrahydropyranyl, tetrahydrothiopyranyl, piperazinyl, morpholinyl, thiomorpholinyl, 1,1-dioxo-thiomorpholin-4-yl, azepanyl, diazepanyl, homopiperazinyl, or oxazepanyl. Examples for bicyclic saturated heterocycloalkyl are 8-aza-bicyclo[3.2.1]octyl, quinuclidinyl, 8-oxa-3-aza-bicyclo[3.2.1]octyl, 9-aza-bicyclo[3.3.1]nonyl, 3-oxa-9-aza-bicyclo[3.3.1]nonyl, or 3-thia-9-aza-bicyclo[3.3.1]nonyl. Examples for partly unsaturated heterocycloalkyl are dihydrofuryl, imidazolinyl, dihydro-oxazolyl, tetrahydro-pyridinyl or dihydropyranyl.

### Pharmaceutically Acceptable Salts

[0183] The term “pharmaceutically acceptable salts” refers to those salts which retain the biological effectiveness and properties of the free bases or free acids, which are not biologically or otherwise undesirable. The salts are formed with inorganic acids such as hydrochloric acid, hydrobromic acid, sulfuric acid, nitric acid, phosphoric acid, particularly hydrochloric acid, and organic acids such as acetic acid, propionic acid, glycolic acid, pyruvic acid, oxalic acid, maleic acid, malonic acid, succinic acid, fumaric acid, tartaric acid, citric acid, benzoic acid, cinnamic acid, mandelic acid, methanesulfonic acid, ethanesulfonic acid, p-toluenesulfonic acid, salicylic acid, N-acetylcystein. In addition these salts may be prepared form addition of an inorganic base or an organic base to the free acid. Salts derived from an inorganic base include, but are not limited to, the sodium, potassium, lithium, ammonium, calcium, magnesium salts. Salts derived from organic bases include, but are not limited to salts of primary, secondary, and tertiary amines, substituted amines including naturally occurring substituted amines, cyclic amines and basic ion exchange resins, such as isopropylamine, trimethylamine, diethylamine, triethylamine, tripropylamine, ethanolamine, lysine, arginine, N-ethylpiperidine, piperidine, polyamine resins. The compound of formula (I) can also be present in the form of zwitterions. Particularly preferred pharmaceutically acceptable salts of compounds of formula (I) are the salts of hydrochloric acid, hydrobromic acid, sulfuric acid, phosphoric acid and methanesulfonic acid.

### Protecting Group

[0184] The term “protecting group”, alone or in combination, signifies a group which selectively blocks a reactive site in a multifunctional compound such that a chemical reaction can be carried out selectively at another unprotected reactive site. Protecting groups can be removed. Exemplary protecting groups are amino-protecting groups, carboxy-protecting groups or hydroxy-protecting groups.

### Nuclease Mediated Degradation

[0185] Nuclease mediated degradation refers to an oligonucleotide capable of mediating degradation of a complementary nucleotide sequence when forming a duplex with such a sequence.

[0186] In some embodiments, the oligonucleotide may function via nuclease mediated degradation of the target nucleic acid, where the oligonucleotides of the invention are capable of recruiting a nuclease, particularly and endonuclease, preferably endoribonuclease (RNase), such as RNase H. Examples of oligonucleotide designs which operate via nuclease mediated mechanisms are oligonucleotides which typically comprise a region of at least 5 or 6 DNA nucleosides and are flanked on one side or both sides by affinity enhancing nucleosides, for example gapmers, headmers and tailmers.

### RNase H Activity and Recruitment

[0187] The RNase H activity of an antisense oligonucleotide refers to its ability to recruit RNase H when in a duplex with a complementary RNA molecule. WO01/23613 provides in vitro methods for determining RNaseH activity, which may be used to determine the ability to recruit RNaseH. Typically an oligonucleotide is deemed capable of recruiting RNase H if it, when provided with a complementary target nucleic acid sequence, has an initial rate, as measured in pmol/l/min, of at least 5%, such as at least 10% or more than 20% of the of the initial rate determined when using a oligonucleotide having the same base sequence as the modified oligonucleotide being tested, but containing only DNA monomers with phosphorothioate linkages between all monomers in the oligonucleotide, and using the methodology provided by Example 91-95 of WO01/23613 (hereby incorporated by reference). For use in determining RHase H activity, recombinant human RNase H1 is available from Lubio Science GmbH, Lucerne, Switzerland.

### Gapmer

[0188] The antisense oligonucleotide of the invention, or contiguous nucleotide sequence thereof may be a gapmer. The antisense gapmers are commonly used to inhibit a target nucleic acid via RNase H mediated degradation. A gapmer oligonucleotide comprises at least three distinct structural regions a 5′-flank, a gap and a 3′-flank, F-G-F′ in the ‘5->3’ orientation. The “gap” region (G) comprises a stretch of contiguous DNA nucleotides which enable the oligonucleotide to recruit RNase H. The gap region is flanked by a 5′ flanking region (F) comprising one or more sugar modified nucleosides, advantageously high affinity sugar modified nucleosides, and by a 3′ flanking region (F′) comprising one or more sugar modified nucleosides, advantageously high affinity sugar modified nucleosides. The one or more sugar modified nucleosides in region F and F′ enhance the affinity of the oligonucleotide for the target nucleic acid (i.e. are affinity enhancing sugar modified nucleosides). In some embodiments, the one or more sugar modified nucleosides in region F and F′ are 2′ sugar modified nucleosides, such as high affinity 2′ sugar modifications, such as independently selected from LNA and 2′-MOE.

[0189] In a gapmer design, the 5′ and 3′ most nucleosides of the gap region are DNA nucleosides, and are positioned adjacent to a sugar modified nucleoside of the 5′ (F) or 3′ (F′) region respectively. The flanks may further defined by having at least one sugar modified nucleoside at the end most distant from the gap region, i.e. at the 5′ end of the 5′ flank and at the 3′ end of the 3′ flank.

[0190] Regions F-G-F′ form a contiguous nucleotide sequence. Antisense oligonucleotides of the invention, or the contiguous nucleotide sequence thereof, may comprise a gapmer region of formula F-G-F′.

[0191] The overall length of the gapmer design F-G-F′ may be, for example 12 to 32 nucleosides, such as 13 to 24, such as 14 to 22 nucleosides, Such as from 14 to 17, such as 16 to 18 nucleosides.

[0192] By way of example, the gapmer oligonucleotide of the present invention can be represented by the following formulae:
[0193] F₁₋₈-G₅₋₁₅-F′₁₋₈, such as
[0194] F₁₋₈-G₇₋₁₅-F₂₋₈
   with the proviso that the overall length of the gapmer regions F-G-F′ is at least 12, such as at least 14 nucleotides in length.

[0195] Regions F, G and F′ are further defined below and can be incorporated into the F-G-F′ formula.

### Gapmer—Region G

[0196] Region G (gap region) of the gapmer is a region of nucleosides which enables the oligonucleotide to recruit RNaseH, such as human RNase H1, typically DNA nucleosides. RNaseH is a cellular enzyme which recognizes the duplex between DNA and RNA, and enzymatically cleaves the RNA molecule. Suitably gapmers may have a gap region (G) of at least 5 or 6 contiguous DNA nucleosides, such as 5-16 contiguous DNA nucleosides, such as 6-15 contiguous DNA nucleosides, such as 7-14 contiguous DNA nucleosides, such as 8-12 contiguous DNA nucleotides, such as 8-12 contiguous DNA nucleotides in length. The gap region G may, in some embodiments consist of 6, 7, 8, 9, 10, 11, 12, 13, 14, 15 or 16 contiguous DNA nucleosides. Cytosine (C) DNA in the gap region may in some instances be methylated, such residues are either annotated as 5-methyl-cytosine (meC or with an e instead of a c). Methylation of Cytosine DNA in the gap is advantageous if cg dinucleotides are present in the gap to reduce potential toxicity, the modification does not have significant impact on efficacy of the oligonucleotides.

[0197] In some embodiments the gap region G may consist of 6, 7, 8, 9, 10, 11, 12, 13, 14, 15 or 16 contiguous phosphorothioate linked DNA nucleosides. In some embodiments, all internucleoside linkages in the gap are phosphorothioate linkages.

[0198] Whilst traditional gapmers have a DNA gap region, there are numerous examples of modified nucleosides which allow for RNaseH recruitment when they are used within the gap region. Modified nucleosides which have been reported as being capable of recruiting RNaseH when included within a gap region include, for example, alpha-L-LNA, C4′ alkylated DNA (as described in PCT/EP2009/050349 and Vester et al., Bioorg. Med. Chem. Lett. 18 (2008) 2296-2300, both incorporated herein by reference), arabinose derived nucleosides like ANA and 2′F-ANA (Mangos et al. 2003 J. AM. CHEM. SOC. 125, 654-661), UNA (unlocked nucleic acid) (as described in Fluiter et al., Mol. Biosyst., 2009, 10, 1039 incorporated herein by reference). UNA is unlocked nucleic acid, typically where the bond between C2 and C3 of the ribose has been removed, forming an unlocked “sugar” residue. The modified nucleosides used in such gapmers may be nucleosides which adopt a 2′ endo (DNA like) structure when introduced into the gap region, i.e. modifications which allow for RNaseH recruitment). In some embodiments the DNA Gap region (G) described herein may optionally contain 1 to 3 sugar modified nucleosides which adopt a 2′ endo (DNA like) structure when introduced into the gap region.

### Region G—“Gap-Breaker”

[0199] Alternatively, there are numerous reports of the insertion of a modified nucleoside which confers a 3′ endo conformation into the gap region of gapmers, whilst retaining some RNaseH activity. Such gapmers with a gap region comprising one or more 3′endo modified nucleosides are referred to as “gap-breaker” or “gap-disrupted” gapmers, see for example WO2013/022984. Gap-breaker oligonucleotides retain sufficient region of DNA nucleosides within the gap region to allow for RNaseH recruitment. The ability of gapbreaker oligonucleotide design to recruit RNaseH is typically sequence or even compound specific—see Rukov et al. 2015 Nucl. Acids Res. Vol. 43 pp. 8476-8487, which discloses “gapbreaker” oligonucleotides which recruit RNaseH which in some instances provide a more specific cleavage of the target RNA. Modified nucleosides used within the gap region of gap-breaker oligonucleotides may for example be modified nucleosides which confer a 3′endo confirmation, such 2′-O-methyl (OMe) or 2′-O-MOE (MOE) nucleosides, or beta-D LNA nucleosides (the bridge between C2′ and C4′ of the ribose sugar ring of a nucleoside is in the beta conformation), such as beta-D-oxy LNA or ScET nucleosides.

[0200] As with gapmers containing region G described above, the gap region of gap-breaker or gap-disrupted gapmers, have a DNA nucleosides at the 5′ end of the gap (adjacent to the 3′ nucleoside of region F), and a DNA nucleoside at the 3′ end of the gap (adjacent to the 5′ nucleoside of region F′). Gapmers which comprise a disrupted gap typically retain a region of at least 3 or 4 contiguous DNA nucleosides at either the 5′ end or 3′ end of the gap region.

[0201] Exemplary designs for gap-breaker oligonucleotides include
[0202] F₁₋₈-[D₃₋₄-E₁-D₃₋₄]-F′₁₋₈
[0203] F₁₋₈-[D₁₋₄-E₁-D₃₋₄]-F′₁₋₈
[0204] F₁₋₈-[D₃₋₄-E₁-D₁₋₄]-F′₁₋₈
   wherein region G is within the brackets [Dₙ-Eᵣ-Dₘ], D is a contiguous sequence of DNA nucleosides, E is a modified nucleoside (the gap-breaker or gap-disrupting nucleoside), and F and F′ are the flanking regions as defined herein, and with the proviso that the overall length of the gapmer regions F-G-F′ is at least 12, such as at least 14 nucleotides in length.

[0205] In some embodiments, region G of a gap disrupted gapmer comprises at least 6 DNA nucleosides, such as 6, 7, 8, 9, 10, 11, 12, 13, 14, 15 or 16 DNA nucleosides. As described above, the DNA nucleosides may be contiguous or may optionally be interspersed with one or more modified nucleosides, with the proviso that the gap region G is capable of mediating RNaseH recruitment.

### Gapmer—Flanking Regions, F and F′

[0206] Region F is positioned immediately adjacent to the 5′ DNA nucleoside of region G. The 3′ most nucleoside of region F is a sugar modified nucleoside, such as a high affinity sugar modified nucleoside, for example a 2′ substituted nucleoside, such as a MOE nucleoside, or an LNA nucleoside.

[0207] Region F′ is positioned immediately adjacent to the 3′ DNA nucleoside of region G. The 5′ most nucleoside of region F′ is a sugar modified nucleoside, such as a high affinity sugar modified nucleoside, for example a 2′ substituted nucleoside, such as a MOE nucleoside, or an LNA nucleoside.

[0208] Region F is 1-8 contiguous nucleotides in length, such as 2-6, such as 3-4 contiguous nucleotides in length. Advantageously the 5′ most nucleoside of region F is a sugar modified nucleoside. In some embodiments the two 5′ most nucleoside of region F are sugar modified nucleoside. In some embodiments the 5′ most nucleoside of region F is an LNA nucleoside. In some embodiments the two 5′ most nucleoside of region F are LNA nucleosides. In some embodiments the two 5′ most nucleoside of region F are 2′ substituted nucleoside nucleosides, such as two 3′ MOE nucleosides. In some embodiments the 5′ most nucleoside of region F is a 2′ substituted nucleoside, such as a MOE nucleoside.

[0209] Region F′ is 2-8 contiguous nucleotides in length, such as 3-6, such as 4-5 contiguous nucleotides in length. Advantageously, embodiments the 3′ most nucleoside of region F′ is a sugar modified nucleoside. In some embodiments the two 3′ most nucleoside of region F′ are sugar modified nucleoside. In some embodiments the two 3′ most nucleoside of region F′ are LNA nucleosides. In some embodiments the 3′ most nucleoside of region F′ is an LNA nucleoside. In some embodiments the two 3′ most nucleoside of region F′ are 2′ substituted nucleoside nucleosides, such as two 3′ MOE nucleosides. In some embodiments the 3′ most nucleoside of region F′ is a 2′ substituted nucleoside, such as a MOE nucleoside.

[0210] It should be noted that when the length of region F or F′ is one, it is advantageously an LNA nucleoside.

[0211] In some embodiments, region F and F′ independently consists of or comprises a contiguous sequence of sugar modified nucleosides. In some embodiments, the sugar modified nucleosides of region F may be independently selected from 2′-O-alkyl-RNA units, 2′-O-methyl-RNA, 2′-amino-DNA units, 2′-fluoro-DNA units, 2′-alkoxy-RNA, MOE units, LNA units, arabino nucleic acid (ANA) units and 2′-fluoro-ANA units.

[0212] In some embodiments, region F and F′ independently comprises both LNA and a 2′ substituted modified nucleosides (mixed wing design).

[0213] In some embodiments, region F and F′ consists of only one type of sugar modified nucleosides, such as only MOE or only beta-D-oxy LNA or only ScET. Such designs are also termed uniform flanks or uniform gapmer design.

[0214] In some embodiments, all the nucleosides of region F or F′, or F and F′ are LNA nucleosides, such as independently selected from beta-D-oxy LNA, ENA or ScET nucleosides. In some embodiments region F consists of 1-5, such as 2-4, such as 3-4 such as 1, 2, 3, 4 or 5 contiguous LNA nucleosides. In some embodiments, all the nucleosides of region F and F′ are beta-D-oxy LNA nucleosides.

[0215] In some embodiments, all the nucleosides of region F or F′, or F and F′ are 2′ substituted nucleosides, such as OMe or MOE nucleosides. In some embodiments region F consists of 1, 2, 3, 4, 5, 6, 7, or 8 contiguous OMe or MOE nucleosides. In some embodiments only one of the flanking regions can consist of 2′ substituted nucleosides, such as OMe or MOE nucleosides. In some embodiments it is the 5′ (F) flanking region that consists 2′ substituted nucleosides, such as OMe or MOE nucleosides whereas the 3′ (F′) flanking region comprises at least one LNA nucleoside, such as beta-D-oxy LNA nucleosides or cET nucleosides. In some embodiments it is the 3′ (F′) flanking region that consists 2′ substituted nucleosides, such as OMe or MOE nucleosides whereas the 5′ (F) flanking region comprises at least one LNA nucleoside, such as beta-D-oxy LNA nucleosides or cET nucleosides.

[0216] In some embodiments, all the modified nucleosides of region F and F′ are LNA nucleosides, such as independently selected from beta-D-oxy LNA, ENA or ScET nucleosides, wherein region F or F′, or F and F′ may optionally comprise DNA nucleosides (an alternating flank, see definition of these for more details). In some embodiments, all the modified nucleosides of region F and F′ are beta-D-oxy LNA nucleosides, wherein region F or F′, or F and F′ may optionally comprise DNA nucleosides (an alternating flank, see definition of these for more details).

[0217] In some embodiments the 5′ most and the 3′ most nucleosides of region F and F′ are LNA nucleosides, such as beta-D-oxy LNA nucleosides or ScET nucleosides.

[0218] In some embodiments, the internucleoside linkage between region F and region G is a phosphorothioate internucleoside linkage. In some embodiments, the internucleoside linkage between region F′ and region G is a phosphorothioate internucleoside linkage. In some embodiments, the internucleoside linkages between the nucleosides of region F or F′, F and F′ are phosphorothioate internucleoside linkages.

[0219] Further gapmer designs are disclosed in WO 2004/046160, WO 2007/146511 and WO 2008/113832, hereby incorporated by reference.

### LNA Gapmer

[0220] An LNA gapmer is a gapmer wherein either one or both of region F and F′ comprises or consists of LNA nucleosides. A beta-D-oxy gapmer is a gapmer wherein either one or both of region F and F′ comprises or consists of beta-D-oxy LNA nucleosides.

[0221] In some embodiments the LNA gapmer is of formula: [LNA]₁₋₅-[region G]-[LNA]₁₋₅, wherein region G is as defined in the Gapmer region G definition.

[0222] MOE Gapmers A MOE gapmers is a gapmer wherein regions F and F′ consist of MOE nucleosides. In some embodiments the MOE gapmer is of design [MOE]₁₋₈-[Region G]-[MOE]₁₋₈, such as [MOE]₂₋₇-[Region G]₅₋₁₆-[MOE]₂₋₇, such as [MOE]₃₋₆-[Region G]-[MOE]₃₋₆, wherein region G is as defined in the Gapmer definition. MOE gapmers with a 5-10-5 design (MOE-DNA-MOE) have been widely used in the art.

### Mixed Wing Gapmer

[0223] A mixed wing gapmer is an LNA gapmer wherein one or both of region F and F′ comprise a 2′ substituted nucleoside, such as a 2′ substituted nucleoside independently selected from the group consisting of 2′-O-alkyl-RNA units, 2′-O-methyl-RNA, 2′-amino-DNA units, 2′-fluoro-DNA units, 2′-alkoxy-RNA, MOE units, arabino nucleic acid (ANA) units and 2′-fluoro-ANA units, such as a MOE nucleosides. In some embodiments wherein at least one of region F and F′, or both region F and F′ comprise at least one LNA nucleoside, the remaining nucleosides of region F and F′ are independently selected from the group consisting of MOE and LNA. In some embodiments wherein at least one of region F and F′, or both region F and F′ comprise at least two LNA nucleosides, the remaining nucleosides of region F and F′ are independently selected from the group consisting of MOE and LNA. In some mixed wing embodiments, one or both of region F and F′ may further comprise one or more DNA nucleosides.

[0224] Mixed wing gapmer designs are disclosed in WO 2008/049085 and WO 2012/109395, both of which are hereby incorporated by reference.

### Alternating Flank Gapmers

[0225] Flanking regions may comprise both LNA and DNA nucleoside and are referred to as “alternating flanks” as they comprise an alternating motif of LNA-DNA-LNA nucleosides. Gapmers comprising such alternating flanks are referred to as “alternating flank gapmers”. “Alternative flank gapmers” are thus LNA gapmer oligonucleotides where at least one of the flanks (F or F′) comprises DNA in addition to the LNA nucleoside(s). In some embodiments at least one of region F or F′, or both region F and F′, comprise both LNA nucleosides and DNA nucleosides. In such embodiments, the flanking region F or F′, or both F and F′ comprise at least three nucleosides, wherein the 5′ and 3′ most nucleosides of the F and/or F′ region are LNA nucleosides.

[0226] Alternating flank LNA gapmers are disclosed in WO 2016/127002.

[0227] Oligonucleotides with alternating flanks are LNA gapmer oligonucleotides where at least one of the flanks (F or F′) comprises DNA in addition to the LNA nucleoside(s). In some embodiments at least one of region F or F′, or both region F and F′, comprise both LNA nucleosides and DNA nucleosides. In such embodiments, the flanking region F or F′, or both F and F′ comprise at least three nucleosides, wherein the 5′ and 3′ most nucleosides of the F and/or F′ region are LNA nucleosides.

[0228] In some embodiments at least one of region F or F′, or both region F and F′, comprise both LNA nucleosides and DNA nucleosides. In such embodiments, the flanking region F or F′, or both F and F′ comprise at least three nucleosides, wherein the 5′ and 3′ most nucleosides of the F or F′ region are LNA nucleosides, and the. Flanking regions which comprise both LNA and DNA nucleoside are referred to as alternating flanks, as they comprise an alternating motif of LNA-DNA-LNA nucleosides. Alternating flank LNA gapmers are disclosed in WO2016/127002.

[0229] An alternating flank region may comprise up to 3 contiguous DNA nucleosides, such as 1 to 2 or 1 or 2 or 3 contiguous DNA nucleosides.

[0230] The alternating flak can be annotated as a series of integers, representing a number of LNA nucleosides (L) followed by a number of DNA nucleosides (D), for example
[0231] [L]₁₋₃-[D]₁₋₄-[L]₁₋₃
[0232] [L]₁₋₂-[D]₁₋₂-[L]₁₋₂-[D]₁₋₂-[L]₁₋₂

[0233] In oligonucleotide designs these will often be represented as numbers such that 2-2-1 represents 5′ [L]₂-[D]₂-[L] 3′, and 1-1-1-1-1 represents 5′ [L]-[D]-[L]-[D]-[L] 3′. The length of the flank (region F and F′) in oligonucleotides with alternating flanks may independently be 3 to 10 nucleosides, such as 4 to 8, such as 5 to 6 nucleosides, such as 4, 5, 6 or 7 modified nucleosides. In some embodiments only one of the flanks in the gapmer oligonucleotide is alternating while the other is constituted of LNA nucleotides. It may be advantageous to have at least two LNA nucleosides at the 3′ end of the 3′ flank (F′), to confer additional exonuclease resistance. Some examples of oligonucleotides with alternating flanks are:
[0234] [L]₁₋₅-[D]₁₋₄-[L]₁₋₃-[G]₅₋₁₆-[L]₂₋₆
[0235] [L]₁₋₂-[D]₁₋₂-[L]₁₋₂-[D]₁₋₂-[L]₁₋₂-[G]₅₋₁₆-[L]₁₋₂-[D]₁₋₃-[L]₂₋₄
[0236] [L]₁₋₅-[G]₅₋₁₆-[L]-[D]-[L]-[D]-[L]₂
   with the proviso that the overall length of the gapmer is at least 12, such as at least 14 nucleotides in length.

### Region D′ or D″ in an Oligonucleotide

[0237] The oligonucleotide of the invention may in some embodiments comprise or consist of the contiguous nucleotide sequence of the oligonucleotide which is complementary to the target nucleic acid, such as the gapmer F-G-F′, and further 5′ and/or 3′ nucleosides. The further 5′ and/or 3′ nucleosides may or may not be fully complementary to the target nucleic acid. Such further 5′ and/or 3′ nucleosides may be referred to as region D′ and D″ herein.

[0238] The addition of region D′ or D″ may be used for the purpose of joining the contiguous nucleotide sequence, such as the gapmer, to a conjugate moiety or another functional group. When used for joining the contiguous nucleotide sequence with a conjugate moiety is can serve as a biocleavable linker. Alternatively it may be used to provide exonucleoase protection or for ease of synthesis or manufacture.

[0239] Region D′ and D″ can be attached to the 5′ end of region F or the 3′ end of region F′, respectively to generate designs of the following formulas D′-F-G-F′, F-G-F′-D″ or

[0240] D′-F-G-F′-D″. In this instance the F-G-F′ is the gapmer portion of the oligonucleotide and region D′ or D″ constitute a separate part of the oligonucleotide.

[0241] Region D′ or D″ may independently comprise or consist of 1, 2, 3, 4 or 5 additional nucleotides, which may be complementary or non-complementary to the target nucleic acid. The nucleotide adjacent to the F or F′ region is not a sugar-modified nucleotide, such as a DNA or RNA or base modified versions of these. The D′ or D′ region may serve as a nuclease susceptible biocleavable linker (see definition of linkers). In some embodiments the additional 5′ and/or 3′ end nucleotides are linked with phosphodiester linkages, and are DNA or RNA. Nucleotide based biocleavable linkers suitable for use as region D′ or D″ are disclosed in WO 2014/076195, which include by way of example a phosphodiester linked DNA dinucleotide. The use of biocleavable linkers in poly-oligonucleotide constructs is disclosed in WO 2015/113922, where they are used to link multiple antisense constructs (e.g. gapmer regions) within a single oligonucleotide.

[0242] In one embodiment the oligonucleotide of the invention comprises a region D′ and/or D″ in addition to the contiguous nucleotide sequence which constitutes the gapmer.

[0243] In some embodiments, the oligonucleotide of the present invention can be represented by the following formulae:
[0244] F-G-F′; in particular F₁₋₈-G₅₋₁₆-F′₂₋₈
[0245] D′-F-G-F′, in particular D′₁₋₃-F₁₋₈-G₅₋₁₆-F′₂₋₈
[0246] F-G-F′-D″, in particular F₁₋₈-G₅₋₁₆-F′₂₋₈-D″₁₋₃
[0247] D′-F-G-F′-D″, in particular D′₁₋₃-F₁₋₈-G₅₋₁₆-F′₂₋₈-D″₁₋₃

[0248] In some embodiments the internucleoside linkage positioned between region D′ and region F is a phosphodiester linkage. In some embodiments the internucleoside linkage positioned between region F′ and region D″ is a phosphodiester linkage.

### Conjugate

[0249] The term conjugate as used herein refers to an oligonucleotide which is covalently linked to a non-nucleotide moiety (conjugate moiety or region C or third region).

[0250] Conjugation of the oligonucleotide of the invention to one or more non-nucleotide moieties may improve the pharmacology of the oligonucleotide, e.g. by affecting the activity, cellular distribution, cellular uptake or stability of the oligonucleotide. In some embodiments the conjugate moiety modify or enhance the pharmacokinetic properties of the oligonucleotide by improving cellular distribution, bioavailability, metabolism, excretion, permeability, and/or cellular uptake of the oligonucleotide. In particular the conjugate may target the oligonucleotide to a specific organ, tissue or cell type and thereby enhance the effectiveness of the oligonucleotide in that organ, tissue or cell type. A the same time the conjugate may serve to reduce activity of the oligonucleotide in non-target cell types, tissues or organs, e.g. off target activity or activity in non-target cell types, tissues or organs. WO 93/07883 and WO2013/033230 provides suitable conjugate moieties, which are hereby incorporated by reference. Further suitable conjugate moieties are those capable of binding to the asialoglycoprotein receptor (ASGPr). In particular tri-valent N-acetylgalactosamine conjugate moieties are suitable for binding to the ASGPr, see for example WO 2014/076196, WO 2014/207232 and WO 2014/179620 (hereby incorporated by reference, in particular, FIG. 13 of WO2014/076196 or claims 158-164 of WO2014/179620).

[0251] Oligonucleotide conjugates and their synthesis has also been reported in comprehensive reviews by Manoharan in Antisense Drug Technology, Principles, Strategies, and Applications, S. T. Crooke, ed., Ch. 16, Marcel Dekker, Inc., 2001 and Manoharan, Antisense and Nucleic Acid Drug Development, 2002, 12, 103, each of which is incorporated herein by reference in its entirety.

[0252] In an embodiment, the non-nucleotide moiety (conjugate moiety) is selected from the group consisting of carbohydrates, cell surface receptor ligands, drug substances, hormones, lipophilic substances, polymers, proteins, peptides, toxins (e.g. bacterial toxins), vitamins, viral proteins (e.g. capsids) or combinations thereof.

### Linkers

[0253] A linkage or linker is a connection between two atoms that links one chemical group or segment of interest to another chemical group or segment of interest via one or more covalent bonds. Conjugate moieties can be attached to the oligonucleotide directly or through a linking moiety (e.g. linker or tether). Linkers serve to covalently connect a third region (region C), e.g. a conjugate moiety to to a first region, e.g. an oligonucleotide or contiguous nucleotide sequence complementary to the target nucleic acid (region A), thereby connecting one of the termini of region A to C.

[0254] In some embodiments of the invention the conjugate or oligonucleotide conjugate of the invention may optionally, comprise a linker region (second region or region B and/or region Y) which is positioned between the oligonucleotide or contiguous nucleotide sequence complementary to the target nucleic acid (region A or first region) and the conjugate moiety (region C or third region).

[0255] Region B refers to biocleavable linkers comprising or consisting of a physiologically labile bond that is cleavable under conditions normally encountered or analogous to those encountered within a mammalian body. Conditions under which physiologically labile linkers undergo chemical transformation (e.g., cleavage) include chemical conditions such as pH, temperature, oxidative or reductive conditions or agents, and salt concentration found in or analogous to those encountered in mammalian cells. Mammalian intracellular conditions also include the presence of enzymatic activity normally present in a mammalian cell such as from proteolytic enzymes or hydrolytic enzymes or nucleases. In one embodiment the biocleavable linker is susceptible to S1 nuclease cleavage. In a preferred embodiment the nuclease susceptible linker comprises between 1 and 10 nucleosides, such as 1, 2, 3, 4, 5, 6, 7, 8, 9 or 10 nucleosides, more preferably between 2 and 6 nucleosides and most preferably between 2 and 4 linked nucleosides comprising at least two consecutive phosphodiester linkages, such as at least 3 or 4 or 5 consecutive phosphodiester linkages. Preferably the nucleosides are DNA or RNA. Phosphodiester containing biocleavable linkers are described in more detail in WO 2014/076195 (hereby incorporated by reference).

[0256] Conjugates may also be linked to the oligonucleotide via non-biocleavable linkers, or in some embodiments the conjugate may comprise a non-cleavable linker which is covalently attached to the biocleavable linker (region Y). Linkers that are not necessarily biocleavable but primarily serve to covalently connect a conjugate moiety (region C or third region), to an oligonucleotide (region A or first region), may comprise a chain structure or an oligomer of repeating units such as ethylene glycol, amino acid units or amino alkyl groups The oligonucleotide conjugates of the present invention can be constructed of the following regional elements A-C, A-B—C, A-B—Y—C, A-Y—B—C or A-Y—C. In some embodiments the non-cleavable linker (region Y) is an amino alkyl, such as a C2-C36 amino alkyl group, including, for example C6 to C12 amino alkyl groups. In a preferred embodiment the linker (region Y) is a C6 amino alkyl group. Conjugate linker groups may be routinely attached to an oligonucleotide via use of an amino modified oligonucleotide, and an activated ester group on the conjugate group.

### Treatment

[0257] The term ‘treatment’ as used herein refers to both treatment of an existing disease (e.g. a disease or disorder as herein referred to), or prevention of a disease, i.e. prophylaxis. It will therefore be recognized that treatment as referred to herein may, in some embodiments, be prophylactic.

### DETAILED DESCRIPTION OF THE INVENTION

### The Oligonucleotides of the Invention

[0258] The invention relates to oligonucleotides capable of inhibiting expression of ERC1. The modulation may be achieved by hybridizing to a target nucleic acid encoding ERC1 or which is involved in the regulation of ERC1. The target nucleic acid may be a mammalian ERC1 sequence, such as a sequence selected from the group consisting of SEQ's ID NO's: 1, 2, 3, 4, 5, 6, 7, 8, 9, 10, 11, 12 and 13, or naturally occurring variants thereof.

[0259] The oligonucleotide of the invention is an antisense oligonucleotide which targets ERC1 pre-mRNA or mRNA.

[0260] In some embodiments the antisense oligonucleotide of the invention is capable of modulating the expression of the target by inhibiting or reducing target expression. Preferably, such modulation produces an inhibition of expression of at least 20% compared to the normal expression level of the target, more preferably at least 30%, 40%, 50%, 60%, 70%, 80%, or 90%, 95% inhibition compared to the normal expression level of the target. In some embodiments oligonucleotides of the invention may be capable of inhibiting expression levels of ERC1 mRNA by at least 60% or 70% in vitro using HeLa cells. In some embodiments compounds of the invention may be capable of inhibiting expression levels of ERC1 protein by at least 50% in vitro using HeLa cells. Suitably, the examples provide assays which may be used to measure ERC1 RNA or protein inhibition (e.g. example 1). The target modulation is triggered by the hybridization between a contiguous nucleotide sequence of the oligonucleotide and the target nucleic acid. In some embodiments the oligonucleotide of the invention comprises mismatches between the oligonucleotide and the target nucleic acid. Despite mismatches hybridization to the target nucleic acid may still be sufficient to show a desired modulation of ERC1 expression. Reduced binding affinity resulting from mismatches may advantageously be compensated by increased number of nucleotides in the oligonucleotide and/or an increased number of modified nucleosides capable of increasing the binding affinity to the target, such as 2′ sugar modified nucleosides, including LNA, present within the oligonucleotide sequence.

[0261] An aspect of the present invention relates to an antisense oligonucleotide of 10 to 50, such as 10-30, nucleotides in length, which comprises a contiguous nucleotide sequence of 10 to 30 nucleotides in length with at least 90% complementarity, such as full complementarity, to a mammalian ERC1 target nucleic acid, wherein the antisense oligonucleotide is capable of reducing the expression of the mammalian ERC1 target nucleic acid in a cell.

[0262] An aspect of the present invention relates to an antisense oligonucleotide of 10 to 30 nucleotides in length, which comprises a contiguous nucleotide sequence of 10 to 22 nucleotides in length with at least 90% complementarity, such as full complementarity, to a mammalian ERC1 target nucleic acid, wherein the antisense oligonucleotide is capable of reducing the expression of the mammalian ERC1 target nucleic acid in a cell.

[0263] In some embodiments, the oligonucleotide comprises a contiguous sequence which is at least 90% complementary, such as at least 91%, such as at least 92%, such as at least 93%, such as at least 94%, such as at least 95%, such as at least 96%, such as at least 97%, such as at least 98%, or 100% complementary with a region of the target nucleic acid or the target sequence.

[0264] In a preferred embodiment the antisense oligonucleotide of the invention, or contiguous nucleotide sequence thereof is fully complementary (100% complementary) to the target nucleic acid or target sequence, or in some embodiments may comprise one or two mismatches between the oligonucleotide and the target nucleic acid.

[0265] Another aspect of the present invention relates to the antisense oligonucleotide, wherein the contiguous nucleotide sequence is at least 90% complementary to a sequence selected from the group consisting of SEQ ID NO1, 2, 3, 4, 5, 6, 7, 8, 9, 10, 11, 12, 13 and 14, or a naturally occurring variant thereof.

[0266] In some embodiments the oligonucleotide sequence or contiguous nucleotide sequence is at least 90% complementary, such as fully (or 100%) complementary, to a target sequence present in SEQ ID NO: 1 and 13. In some embodiments the contiguous sequence of the antisense oligonucleotide is 100% complementary to the mammalian ERC1 target nucleic acid.

[0267] In a preferred embodiment the oligonucleotide sequence or contiguous nucleotide sequence is 100% complementary to a corresponding target sequence present in SEQ ID NO: 1 and SEQ ID NO: 13.

[0268] Another aspect of the present invention relates to the antisense oligonucleotide, wherein the contiguous nucleotide sequence is at least 90% complementary, such as fully complementary, to an intron region present in the pre-mRNA of mammalian ERC1 target nucleic acid (e.g. SEQ ID NO: 1).

[0269] It shall be understood that intron positions on SEQ ID NO: 1 may vary depending on different splicing of ERC1 pre-mRNA. In the context of the present invention any nucleotide sequence in the gene sequence or pre-mRNA that is removed from the pre-mRNA by RNA splicing during maturation of the final RNA product (mature mRNA) are introns irrespectively on their position on SEQ ID NO: 1. Table 1 provides the most common intron regions in SEQ ID NO: 1.

[0270] In some embodiments the contiguous nucleotide sequence is at least 90% complementary, such as fully complementary, to an intron region present in the pre-mRNA of human ERC1, selected from position 815-37239 on SEQ ID NO: 1, position 38065-92655 on SEQ ID NO: 1, 93073-114241 on SEQ ID NO: 1, 114317-119683 on SEQ ID NO: 1, 119840-125357 on SEQ ID NO: 1, 125526-1151111 on SEQ ID NO: 1, 151280-190031 on SEQ ID NO: 1, 190170-191416 on SEQ ID NO: 1, 191558-192772 on SEQ ID NO: 1, 192914-199350 on SEQ ID NO: 1, 199545-246260 on SEQ ID NO: 1, 246397-272525 on SEQ ID NO: 1, 272658-299343 on SEQ ID NO: 1, 299505-381324 on SEQ ID NO: 1.

[0271] In some embodiments the contiguous nucleotide sequence is at least 90% complementary, such as fully complementary, to position 38065-92655 of SEQ ID NO: 1

[0272] In some embodiments the contiguous nucleotide sequence is at least 90% complementary, such as fully complementary, to position 88376-89391 of SEQ ID NO: 1.

[0273] In some embodiments the contiguous nucleotide sequence is at least 90% complementary, such as fully complementary, to SEQ ID NO: 14.

[0274] In some embodiments the contiguous nucleotide sequence is at least 90% complementary, such as fully complementary, to SEQ ID NO: 23.

[0275] In some embodiments the contiguous nucleotide sequence is at least 90% complementary, such as fully complementary, to SEQ ID NO: 24.

[0276] In some embodiments the contiguous nucleotide sequence is at least 90% complementary, such as fully complementary, to SEQ ID NO: 25.

[0277] In some embodiments the contiguous nucleotide sequence is at least 90% complementary, such as fully complementary, to SEQ ID NO: 26.

[0278] In some embodiments, the oligonucleotide or contiguous nucleotide sequence is at least 90% complementary, such as fully complementary, to a region of the target nucleic acid, wherein the target nucleic acid region is selected from the group consisting of position 88284-88297, 88378-88391, 88425-88438, 88472-88485, 88517-88530, 88656-88669, 88703-88716, 88750-88763, 88795-88808, 88842-88855, 88889-88902, 88936-88949, 88983-88996, 89030-89043, 89077-89090, 89124-89137, 89171-89184, 89265-89278, 89312-89325, 89359-88372; 88374-88393, 88421-88440, 88468-88487, 88513-88532, 88652-88671, 88699-88718, 88746-88765, 88791-88810, 88838-88857, 88885-88904, 88932-88951, 88979-88998, 89026-89045, 89073-89092, 89120-89139, 89167-89186, 89261-89280, 89308-89327, 89355-89374; 88374-88391, 88421-88438, 88468-88485, 88513-88530, 88652-88669, 88699-88716, 88746-88763, 88791-88808, 88838-88855, 88885-88902, 88932-88949, 88979-88996, 89026-89043, 89073-89090, 89120-89137, 89167-89184, 89261-89278, 89308-89325, 89355-89372; 88376-88391, 88423-88438, 88470-88485, 88515-88530, 88654-88669, 88701-88716, 88748-88763, 88793-88808, 88840-88855, 88887-88902, 88934-88949, 88981-88996, 89028-89043, 89075-89090, 89122-89137, 89169-89184, 89263-89278, 89310-89325, 89357-89372, 451815-451834, 451816-451833, 451818-451833, 451818-451831 of SEQ ID NO: 1.

[0279] According to one aspect of the invention, the target sequence is repeated within the target nucleic acid, i.e. at least two identical target nucleotide sequences (target regions) of at least 10 nucleotides in length occur in the target nucleic acid at different positions. A repeated target region is generally between 10 and 50 nucleotides, such as between 11 and 30 nucleotides, such as between 12 and 25 nucleotides, such as between 13 and 22 nucleotides, such as between 14 and 20 nucleotides, such as between 15 and 19 nucleotides, such as between 16 and 18 nucleotides. In a preferred embodiment the repeated target region is between 14 and 20 nucleotides.

[0280] In one aspect the invention provides antisense oligonucleotides wherein the contiguous nucleotide sequence is at least 90% complementary, such as fully complementary, to a target region that is repeated at least 2 times across the target nucleic acid of SEQ ID NO: 1. The effect of this is that several oligonucleotide compounds (with the same sequence) can hybridize to one or more target regions on the same target nucleic acid (at the same time), which may result in multiple cleavage events of the target nucleic acid when the oligonucleotide is administered to a cell or an animal or a human.

[0281] In some embodiments the oligonucleotide or the contiguous nucleotide sequence is at least 90% complementary, such as fully complementary to a target region that is repeated at least 5 repeated target regions, such as at least 6, 7, 8, 9, 10, 11, 12, 13, 14 or 15 repeated target regions, or more than 18 repeated target regions. In one embodiment the target region is repeated 19 times within intron 2.

[0282] In a further embodiment the antisense oligonucleotide comprises a contiguous nucleotide sequence that is at least 90% complementary, such as fully complementary, to a target region of 10-22, such as 14-20, nucleotides in length of the target nucleic acid of SEQ ID NO: 1, wherein the target region is repeated at least 5 or more times across the introns of the target nucleic acid.

[0283] In some embodiments, the antisense oligonucleotide of the invention or the contiguous nucleotide sequence thereof is complementary to at least 15, such as 19, repeated target regions in SEQ ID NO: 14.

[0284] In some embodiments, the oligonucleotide of the invention comprises or consists of 10 to 35 nucleotides in length, such as from 10 to 30, such as 11 to 22, such as from 12 to 20, such as from 14 to 18 or 14 to 16 contiguous nucleotides in length. Advantageously, the oligonucleotide comprises or consists of 14 to 20 nucleotides in length.

[0285] In some embodiments, the oligonucleotide or a contiguous nucleotide sequence thereof comprises or consists of 22 or less nucleotides, such as 20 or less nucleotides, such as 18 or less nucleotides, such as 14, 15, 16 or 17 nucleotides.

[0286] In some embodiments, the contiguous nucleotide sequence comprises or consists of 10, 11, 12, 13, 14, 15, 16, 17, 18, 19, 20, 21, 22, 23, 24, 25, 26, 27, 28, 29 or 30 contiguous nucleotides in length. In a preferred embodiment, the oligonucleotide comprises or consists of 14 to 20 nucleotides in length.

[0287] It is to be understood that any range given herein includes the range endpoints. Accordingly, if an oligonucleotide is said to include from 10 to 30 nucleotides, both 10 and 30 nucleotides are included.

[0288] In some embodiments the contiguous nucleotide sequence of the invention is at least 90% identical, such as 100% identical to a sequence selected from the group consisting of SEQ ID NO: 15, 16, 17 and 18.

[0289] In some embodiments the contiguous nucleotide sequence of the invention is at least 90% identical, such as 100% identical to a sequence selected from the group consisting of SEQ ID NO: 19, 20, 21 and 22.

[0290] In some embodiments the antisense oligonucleotide or contiguous nucleotide sequence thereof consists or comprises of 10 to 30 contiguous nucleotides in length with at least 90% identity, preferably 100% identity to a sequence selected from SEQ ID NO: 15, 16, 17 or 18.

[0291] In some embodiments the antisense oligonucleotide or contiguous nucleotide sequence thereof consists or comprises of 10 to 30 contiguous nucleotides in length with at least 90% identity, preferably 100% identity to a sequence selected from SEQ ID NO: 19, 20, 21 or 22.

[0292] In some embodiments the antisense oligonucleotide or contiguous nucleotide sequence thereof consists or comprises of 12 to 20 contiguous nucleotides in length with at least 90% identity, preferably 100% identity to a sequence selected from SEQ ID NO: 15, 16, 17 or 18.

[0293] In some embodiments the antisense oligonucleotide or contiguous nucleotide sequence thereof consists or comprises of 12 to 20 contiguous nucleotides in length with at least 90% identity, preferably 100% identity to a sequence selected from SEQ ID NO 19, 20, 21 or 22.

[0294] In some embodiments the antisense oligonucleotide or contiguous nucleotide sequence thereof consists or comprises of 14 to 20 contiguous nucleotides in length with at least 90% identity, preferably 100% identity to a sequence selected from SEQ ID NO: 15, 16, 17 or 18.

[0295] In some embodiments the antisense oligonucleotide or contiguous nucleotide sequence thereof consists or comprises of 14 to 20 contiguous nucleotides in length with at least 90% identity, preferably 100% identity to a sequence selected from SEQ ID NO 19, 20, 21 and 22.

[0296] In some embodiments, the antisense oligonucleotide or contiguous nucleotide sequence thereof comprises a sequence selected from SEQ ID NO: 15, 16, 17 or 18.

[0297] In some embodiments, the antisense oligonucleotide or contiguous nucleotide sequence thereof comprises a sequence selected from SEQ ID NO: 19, 20, 21 and 22.

[0298] Oligonucleotide compounds represent specific designs of a motif sequence. Capital letters represent beta-D-oxy LNA nucleosides, lowercase letters represent DNA nucleosides, all LNA C are 5-methyl cytosine, and 5-methyl DNA cytosines are presented by “e”, all internucleoside linkages are, preferably, phosphorothioate internucleoside linkages. It is understood that the contiguous nucleobase sequences (motif sequence) can be modified to for example increase nuclease resistance and/or binding affinity to the target nucleic acid. Modifications are described in the definitions and in the “Oligonucleotide design” section. Table 4 lists preferred designs of each motif sequence. The pattern in which the modified nucleosides (such as high affinity modified nucleosides) are incorporated into the oligonucleotide sequence is generally termed oligonucleotide design.

[0299] The oligonucleotides of the invention are designed with modified nucleosides and DNA nucleosides. Advantageously, high affinity modified nucleosides are used.

[0300] In an embodiment, the oligonucleotide comprises at least 1 modified nucleoside, such as at least 2, at least 3, at least 4, at least 5, at least 6, at least 7, at least 8, at least 9, at least 10, at least 11, at least 12, at least 13, at least 14, at least 15 or at least 16 modified nucleosides. In an embodiment the oligonucleotide comprises from 1 to 10 modified nucleosides, such as from 2 to 9 modified nucleosides, such as from 3 to 8 modified nucleosides, such as from 4 to 7 modified nucleosides, such as 6 or 7 modified nucleosides. Suitable modifications are described in the “Definitions” section under “modified nucleoside”, “high affinity modified nucleosides”, “sugar modifications”, “2′ sugar modifications” and Locked nucleic acids (LNA)”.

[0301] In an embodiment, the oligonucleotide comprises one or more sugar modified nucleosides, such as 2′ sugar modified nucleosides. Preferably the oligonucleotide of the invention comprise one or more 2′ sugar modified nucleoside independently selected from the group consisting of 2′-O-alkyl-RNA, 2′-O-methyl-RNA, 2′-alkoxy-RNA, 2′-O-methoxyethyl-RNA, 2′-amino-DNA, 2′-fluoro-DNA, arabino nucleic acid (ANA), 2′-fluoro-ANA and LNA nucleosides. It is advantageous if one or more of the modified nucleoside(s) is a locked nucleic acid (LNA).

[0302] In a further embodiment the oligonucleotide comprises at least one modified internucleoside linkage. Suitable internucleoside modifications are described in the “Definitions” section under “Modified internucleoside linkage”. It is advantageous if at least 75%, such as all, the internucleoside linkages within the contiguous nucleotide sequence are phosphorothioate internucleoside linkages. In some embodiments all the internucleotide linkages in the contiguous sequence of the oligonucleotide are phosphorothioate linkages.

[0303] In some embodiments, the oligonucleotide of the invention comprises at least one LNA nucleoside, such as 1, 2, 3, 4, 5, 6, 7, or 8 LNA nucleosides, such as from 2 to 6 LNA nucleosides, such as from 3 to 7 LNA nucleosides, 4 to 8 LNA nucleosides or 3, 4, 5, 6, 7 or 8 LNA nucleosides. In some embodiments, at least 75% of the modified nucleosides in the oligonucleotide are LNA nucleosides, such as 80%, such as 85%, such as 90% of the modified nucleosides are LNA nucleosides. In a still further embodiment all the modified nucleosides in the oligonucleotide are LNA nucleosides. In a further embodiment, the oligonucleotide may comprise both beta-D-oxy-LNA, and one or more of the following LNA nucleosides: thio-LNA, amino-LNA, oxy-LNA, ScET and/or ENA in either the beta-D or alpha-L configurations or combinations thereof. In a further embodiment, all LNA cytosine units are 5-methyl-cytosine. It is advantageous for the nuclease stability of the oligonucleotide or contiguous nucleotide sequence to have at least 1 LNA nucleoside at the 5′ end and at least 2 LNA nucleosides at the 3′ end of the nucleotide sequence.

[0304] In an embodiment of the invention the oligonucleotide of the invention is capable of recruiting RNase H.

[0305] In the current invention an advantageous structural design is a gapmer design as described in the “Definitions” section under for example “Gapmer”, “LNA Gapmer”, “MOE gapmer” and “Mixed Wing Gapmer” “Alternating Flank Gapmer”. The gapmer design includes gapmers with uniform flanks, mixed wing flanks, alternating flanks, and gapbreaker designs. In the present invention it is advantageous if the oligonucleotide of the invention is a gapmer with an F-G-F′ design. In some embodiments the gapmer is an LNA gapmer with uniform flanks.

[0306] In some embodiments of the invention the LNA gapmer is selected from the following uniform flank designs In preferred embodiments the F-G-F′ design is selected from 4-6-4, 4-8-4, 3-11-4; or 4-13-3.

Exemplary Compounds of the Invention In the exemplified oligonucleotide compounds, capital letters represent beta-D-oxy LNA nucleosides, lowercase letters represent DNA nucleosides, all LNA C are 5-methyl cytosine, and 5-methyl DNA cytosines are presented by “e” or ^{m}c, all internucleoside linkages are phosphorothioate internucleoside linkages.

[0307] For certain embodiments of the invention, the oligonucleotide is selected from the group of oligonucleotide compounds with CMP-ID-NO: 15_1, 16_1, 17_1 and 18_1.

[0308] For certain embodiments of the invention, the oligonucleotide is selected from the group of oligonucleotide compounds with CMP-ID-NO: 19_1, 20_1, 21_1 and 22_1.

### Method of Manufacture

[0309] In a further aspect, the invention provides methods for manufacturing the oligonucleotides of the invention comprising reacting nucleotide units and thereby forming covalently linked contiguous nucleotide units comprised in the oligonucleotide. Preferably, the method uses phophoramidite chemistry (see for example Caruthers et al, 1987, Methods in Enzymology vol. 154, pages 287-313). In a further embodiment the method further comprises reacting the contiguous nucleotide sequence with a conjugating moiety (ligand). In a further aspect a method is provided for manufacturing the composition of the invention, comprising mixing the oligonucleotide or conjugated oligonucleotide of the invention with a pharmaceutically acceptable diluent, solvent, carrier, salt and/or adjuvant.

### Pharmaceutical Salt

[0310] In a further aspect the invention provides a pharmaceutically acceptable salt of the antisense oligonucleotide or a conjugate thereof. In a preferred embodiment, the pharmaceutically acceptable salt is a sodium or a potassium salt.

### Pharmaceutical Composition

[0311] In a further aspect, the invention provides pharmaceutical compositions comprising any of the aforementioned oligonucleotides and/or oligonucleotide conjugates or salts thereof and a pharmaceutically acceptable diluent, carrier, salt and/or adjuvant. A pharmaceutically acceptable diluent includes phosphate-buffered saline (PBS) and pharmaceutically acceptable salts include, but are not limited to, sodium and potassium salts. In some embodiments the pharmaceutically acceptable diluent is sterile phosphate buffered saline. In some embodiments the oligonucleotide is used in the pharmaceutically acceptable diluent at a concentration of 50-300 μM solution.

[0312] Suitable formulations for use in the present invention are found in Remington's Pharmaceutical Sciences, Mack Publishing Company, Philadelphia, Pa., 17th ed., 1985. For a brief review of methods for drug delivery, see, e.g., Langer (Science 249:1527-1533, 1990). WO 2007/031091 provides further suitable and preferred examples of pharmaceutically acceptable diluents, carriers and adjuvants (hereby incorporated by reference). Suitable dosages, formulations, administration routes, compositions, dosage forms, combinations with other therapeutic agents, pro-drug formulations are also provided in WO2007/031091.

[0313] Oligonucleotides or oligonucleotide conjugates of the invention may be mixed with pharmaceutically acceptable active or inert substances for the preparation of pharmaceutical compositions or formulations. Compositions and methods for the formulation of pharmaceutical compositions are dependent upon a number of criteria, including, but not limited to, route of administration, extent of disease, or dose to be administered.

[0314] These compositions may be sterilized by conventional sterilization techniques, or may be sterile filtered. The resulting aqueous solutions may be packaged for use as is, or lyophilized, the lyophilized preparation being combined with a sterile aqueous carrier prior to administration. The pH of the preparations typically will be between 3 and 11, more preferably between 5 and 9 or between 6 and 8, and most preferably between 7 and 8, such as 7 to 7.5. The resulting compositions in solid form may be packaged in multiple single dose units, each containing a fixed amount of the above-mentioned agent or agents, such as in a sealed package of tablets or capsules. The composition in solid form can also be packaged in a container for a flexible quantity, such as in a squeezable tube designed for a topically applicable cream or ointment.

[0315] In some embodiments, the oligonucleotide or oligonucleotide conjugate of the invention is a prodrug. In particular with respect to oligonucleotide conjugates the conjugate moiety is cleaved of the oligonucleotide once the prodrug is delivered to the site of action, e.g. the target cell.

### Applications

[0316] The oligonucleotides of the invention may be utilized as research reagents for, for example, diagnostics, therapeutics and prophylaxis.

[0317] In research, such oligonucleotides may be used to specifically modulate the synthesis of ERC1 protein in cells (e.g. in vitro cell cultures) and experimental animals thereby facilitating functional analysis of the target or an appraisal of its usefulness as a target for therapeutic intervention. Typically the target modulation is achieved by degrading or inhibiting the pre-mRNA or mRNA producing the protein, thereby prevent protein formation or by degrading or inhibiting a modulator of the gene or mRNA producing the protein. Further advantages may be achieved by targeting pre-mRNA thereby preventing formation of the mature mRNA.

[0318] If employing the oligonucleotide of the invention in research or diagnostics the target nucleic acid may be a cDNA or a synthetic nucleic acid derived from DNA or RNA.

[0319] The present invention provides an in vivo or in vitro method for modulating ERC1 expression in a target cell which is expressing ERC1, said method comprising administering an oligonucleotide of the invention in an effective amount to said cell.

[0320] In some embodiments, the target cell, is a mammalian cell in particular a human cell. The target cell may be an in vitro cell culture or an in vivo cell forming part of a tissue in a mammal. In preferred embodiments the target cell is present in plasma, peripheral blood mononuclear cells, lymph node, breast, head and neck, spleen, liver, colon, thyroid, stomach tissue, salivary gland tissue, adrenal tissue, pancreas, prostate, urinary bladder, placenta, uterus, cervix, testis. In some embodiments, the target cell is a cancer cell or a precancerous cell. In some embodiments the target cell is a premetastatic or a metastatic cancer cell. In some embodiments the target cell is a cell infected with Dengue virus, such as Langerhans cells, monocytes, macrophages, and cells in the bone marrow, liver and spleen. In diagnostics the oligonucleotides may be used to detect and quantitate ERC1 expression in cell and tissues by northern blotting, in-situ hybridisation or similar techniques.

[0321] For therapeutics, an animal or a human, suspected of having a disease or disorder, which can be treated by reducing the expression of ERC1.

[0322] The invention provides methods for treating or preventing a disease, comprising administering a therapeutically or prophylactically effective amount of an antisense oligonucleotide, an oligonucleotide conjugate, a pharmaceutical salt or a pharmaceutical composition of the invention to a subject suffering from or susceptible to the disease.

[0323] The invention also relates to an antisense oligonucleotide, a composition, a pharmaceutical salt or a conjugate as defined herein for use as a medicament.

[0324] The oligonucleotide, oligonucleotide conjugate, pharmaceutical salt or a pharmaceutical composition according to the invention is typically administered in an effective amount.

[0325] The invention also provides for the use of the antisense oligonucleotide or oligonucleotide conjugate of the invention as described for the manufacture of a medicament for the treatment of a disorder as referred to herein, or for a method of the treatment of as a disorder as referred to herein.

[0326] The disease or disorder, as referred to herein, is associated with the increased expression of ERC1.

[0327] The methods of the invention are preferably employed for treatment or prophylaxis against diseases caused by abnormally high levels and/or activity of ERC1.

[0328] The invention further relates to use of an antisense oligonucleotide, oligonucleotide conjugate a pharmaceutical salt or a pharmaceutical composition as defined herein for the manufacture of a medicament for the treatment of abnormally high levels and/or activity of ERC1.

[0329] In one embodiment, the invention relates to oligonucleotides, oligonucleotide conjugates or pharmaceutical compositions for use in the treatment of diseases or disorders is cancer or Dengue virus infection.

[0330] In some embodiments cancer is selected from the group comprising cancers, such as thyroid carcinoma, breast cancer, head and neck cancer, colorectal cancer, renal cancer testis cancer, melanoma or metastatic cancer.

### Administration

[0331] The oligonucleotides, conjugates or pharmaceutical compositions of the present invention may be administered enteral (such as, orally or through the gastrointestinal tract) or parenteral (such as, intravenous, subcutaneous, intra-muscular, intracerebral, intracerebroventricular or intrathecal) In a non-limiting embodiment a antisense oligonucleotide, a conjugate, a pharmaceutical salt or pharmaceutical compositions of the present invention are administered by a parenteral route including intravenous, intraarterial, subcutaneous, intraperitoneal or intramuscular injection or infusion.

[0332] In one embodiment the active oligonucleotide or oligonucleotide conjugate is administered intravenously.

[0333] In another embodiment the active oligonucleotide or oligonucleotide conjugate or pharmaceutical composition is administered subcutaneously.

[0334] In some embodiments, the oligonucleotide, oligonucleotide conjugate or pharmaceutical composition of the invention is administered at a dose of 0.1-15 mg/kg, such as from 0.2-10 mg/kg, such as from 0.25-5 mg/kg. The administration can be once a week, every 2^{nd} week, every third week or even once a month.

[0335] The invention also provides for the use of the oligonucleotide or oligonucleotide conjugate of the invention as described for the manufacture of a medicament wherein the medicament is in a dosage form for intravenous administration

[0336] The invention also provides for the use of the antisense oligonucleotide or oligonucleotide conjugate of the invention as described for the manufacture of a medicament wherein the medicament is in a dosage form for subcutaneous administration

### Combination Therapies

[0337] In some embodiments the antisense oligonucleotide, oligonucleotide conjugate or pharmaceutical composition of the invention is for use in a combination treatment with another therapeutic agent. The therapeutic agent can for example be the standard of care for the diseases or disorders described above.

### EMBODIMENTS

[0338] The following embodiments of the present invention may be used in combination with any other embodiments described herein.

[0339] 1. An antisense oligonucleotide of 10 to 50 nucleotides in length, which comprises a contiguous nucleotide sequence of 10 to 30 nucleotides in length with at least 90% complementarity to a mammalian ERC1 target nucleic acid, wherein the antisense oligonucleotide is capable of reducing the expression of the mammalian ERC1 target nucleic acid, in a cell.

[0340] 2. The antisense oligonucleotide according to embodiment 1, wherein the contiguous nucleotide sequence is at least 90% complementary to a sequence selected from the group consisting of SEQ ID NO 1, 2, 3, 4, 5, 6, 7, 8, 9, 10, 11, 12 and 13, or a naturally occurring variant thereof.

[0341] 3. The antisense oligonucleotide of embodiment 1 or 2, wherein the contiguous nucleotide sequence is fully complementary to the mammalian ERC1 target nucleic acid.

[0342] 4. The antisense oligonucleotide according to any one of embodiments 1 to 3, wherein the contiguous nucleotide sequence is at least 90% complementary, such as fully complementary, to an intron region present in the pre-mRNA of mammalian ERC1 target nucleic acid (e.g. SEQ ID NO 1).

[0343] 5. The antisense oligonucleotide according to any one of embodiments 1-4, wherein the contiguous nucleotide sequence is at least 90% complementary, such as fully complementary, to an intron region present in the pre-mRNA of human ERC1, selected from position 815-37239 on SEQ ID NO: 1, position 38065-92655 on SEQ ID NO: 1, 93073-114241 on SEQ ID NO: 1, 114317-119683 on SEQ ID NO: 1, 119840-125357 on SEQ ID NO: 1, 125526-151111 on SEQ ID NO: 1, 151280-190031 on SEQ ID NO: 1, 190170-191416 on SEQ ID NO: 1, 191558-192772 on SEQ ID NO:1, 192914-199350 on SEQ ID NO: 1, 199545-246260 on SEQ ID NO: 1, 246397-272525 on SEQ ID NO: 1, 272658-299343 on SEQ ID NO: 1, 299505-381324 on SEQ ID NO:1, 381470-417640 on SEQ ID NO: 1, 417740-454053 on SEQ ID NO: 1, 454243-499584 on SEQ ID NO: 1.

[0344] 6. The antisense oligonucleotide according to any one of embodiments 1-5, wherein the contiguous nucleotide sequence is at least 90% complementary, such as fully complementary, to a position 38065-92655 on SEQ ID NO: 1 or to position 88379-89391 on SEQ ID NO: 1.

[0345] 7. The antisense oligonucleotide according to any one of embodiments 1-6, wherein the contiguous nucleotide sequence is at least 90% complementary, such as fully complementary, to SEQ ID NO: 14, 23 24 25 or 26.

[0346] 8. The antisense oligonucleotide according to any one of embodiments 1-7, wherein the contiguous nucleotide sequence is at least 90% complementary, such as fully complementary, to a target region of SEQ ID NO 1, selected from the group consisting of position 88284-88297, 88378-88391, 88425-88438, 88472-88485, 88517-88530, 88656-88669, 88703-88716, 88750-88763, 88795-88808, 88842-88855, 88889-88902, 88936-88949, 88983-88996, 89030-89043, 89077-89090, 89124-89137, 89171-89184, 89265-89278, 89312-89325, 89359-88372; 88374-88393, 88421-88440, 88468-88487, 88513-88532, 88652-88671, 88699-88718, 88746-88765, 88791-88810, 88838-88857, 88885-88904, 88932-88951, 88979-88998, 89026-89045, 89073-89092, 89120-89139, 89167-89186, 89261-89280, 89308-89327, 89355-89374; 88374-88391, 88421-88438, 88468-88485, 88513-88530, 88652-88669, 88699-88716, 88746-88763, 88791-88808, 88838-88855, 88885-88902, 88932-88949, 88979-88996, 89026-89043, 89073-89090, 89120-89137, 89167-89184, 89261-89278, 89308-89325, 89355-89372; 88376-88391, 88423-88438, 88470-88485, 88515-88530, 88654-88669, 88701-88716, 88748-88763, 88793-88808, 88840-88855, 88887-88902, 88934-88949, 88981-88996, 89028-89043, 89075-89090, 89122-89137, 89169-89184, 89263-89278, 89310-89325, 89357-89372, 451815-451834, 451816-451833, 451818-451833, and 451818-451831 of SEQ ID NO: 1.

[0347] 9. The antisense oligonucleotide according to any one of embodiments 1-8, wherein the contiguous nucleotide sequence is at least 90% complementary, such as fully complementary, to a target sequence of 10-22, such as 14-20 nucleotides in length of the target nucleic acid of SEQ ID NO: 1, wherein the target sequence is repeated at least 5 or more times across the target nucleic acid.

[0348] 10. The antisense oligonucleotide of embodiment 1 to 3, wherein the oligonucleotide is capable of hybridizing to a target nucleic acid selected from the group consisting of SEQ ID NO: 1 to 8 with a ΔG° below −10 kcal.

[0349] 11. The antisense oligonucleotide of embodiment 1 to 10, wherein the target nucleic acid is RNA.

[0350] 12. The antisense oligonucleotide of embodiment 11, wherein the RNA is mRNA.

[0351] 13. The antisense oligonucleotide of embodiment 12, wherein the mRNA is pre-RNA or mature RNA.

[0352] 14. The antisense oligonucleotide of any one of embodiments 1-13, wherein the contiguous nucleotide sequence comprises or consists of at least 10 contiguous nucleotides, particularly 11, 12, 13, 14, 15, 16, 17, 18, 19, 20, 21, 22, 23, 24, 25, 26, 27, 28, or 29 contiguous nucleotides.

[0353] 15. The antisense oligonucleotide of any one of embodiments 1-14, wherein the contiguous nucleotide sequence comprises or consists of from 12 to 22 nucleotides.

[0354] 16. The antisense oligonucleotide of any one of embodiments 1 to 15, wherein the contiguous nucleotide sequence comprises or consists of from 12-18 nucleotides.

[0355] 17. The antisense oligonucleotide of any one of embodiments 1 to-16, wherein the antisense oligonucleotide comprises or consists of 10 to 35 nucleotides in length.

[0356] 18. The antisense oligonucleotide of any one of embodiments 1 to 17, wherein the antisense oligonucleotide comprises or consists of 11 to 22 nucleotides in length.

[0357] 19. The antisense oligonucleotide of any one of embodiments 17 or 18, wherein the oligonucleotide comprises or consists of 12 to 18 nucleotides in length.

[0358] 20. The antisense oligonucleotide of any one of embodiments 1-19, wherein the oligonucleotide or contiguous nucleotide sequence is single stranded.

[0359] 21. The antisense oligonucleotide of any one of embodiments 1-20 wherein the oligonucleotide is not siRNA nor self-complementary.

[0360] 22. The antisense oligonucleotide of embodiment 1-21, wherein the contiguous nucleotide sequence comprises or consists of a sequence selected from SEQ ID NO: 15, 16, 17 and 18.

[0361] 23. The antisense oligonucleotide of any one of embodiments 1-22, wherein the contiguous nucleotide sequence has zero to three mismatches compared to the target nucleic acid it is complementary to.

[0362] 24. The antisense oligonucleotide of embodiment 23, wherein the contiguous nucleotide sequence has one mismatch compared to the target nucleic acid.

[0363] 25. The antisense oligonucleotide of embodiment 24, wherein the contiguous nucleotide sequence has two mismatches compared to the target nucleic acid.

[0364] 26. The antisense oligonucleotide of embodiment 25, wherein the contiguous nucleotide sequence is fully complementary to the target nucleic acid sequence.

[0365] 27. The antisense oligonucleotide of embodiment 1-26, comprising one or more modified nucleosides.

[0366] 28. The antisense oligonucleotide of embodiment 27, wherein the one or more modified nucleoside is a high-affinity modified nucleosides.

[0367] 29. The antisense oligonucleotide of embodiment 28, wherein the one or more modified nucleoside is a 2′ sugar modified nucleoside.

[0368] 30. The antisense oligonucleotide of embodiment 29, wherein the one or more 2′ sugar modified nucleoside is independently selected from the group consisting of 2′-O-alkyl-RNA, 2′-O-methyl-RNA, 2′-alkoxy-RNA, 2′-O-methoxyethyl-RNA, 2′-amino-DNA, 2′-fluoro-DNA, 2′-fluoro-ANA and LNA nucleosides.

[0369] 31. The antisense oligonucleotide of embodiments 27 to 30, wherein the one or more modified nucleoside is a LNA nucleoside.

[0370] 32. The antisense oligonucleotide of embodiment 31, wherein the modified LNA nucleoside is oxy-LNA.

[0371] 33. The antisense oligonucleotide of embodiment 32, wherein the modified nucleoside is beta-D-oxy-LNA.

[0372] 34. The antisense oligonucleotide of embodiment 31, wherein the modified nucleoside is thio-LNA.

[0373] 35. The antisense oligonucleotide of embodiment 31, wherein the modified nucleoside is amino-LNA.

[0374] 36. The antisense oligonucleotide of embodiment 31, wherein the modified nucleoside is cET.

[0375] 37. The antisense oligonucleotide of embodiment 31, wherein the modified nucleoside is ENA.

[0376] 38. The antisense oligonucleotide of embodiment 31, wherein the modified LNA nucleoside is selected from beta-D-oxy-LNA, alpha-L-oxy-LNA, beta-D-amino-LNA, alpha-L-amino-LNA, beta-D-thio-LNA, alpha-L-thio-LNA, (S)cET, (R)cET beta-D-ENA and alpha-L-ENA.

[0377] 39. The antisense oligonucleotide of any one of embodiments 1-38, wherein the oligonucleotide comprises at least one modified internucleoside linkage.

[0378] 40. The antisense oligonucleotide of embodiment 39, wherein the modified internucleoside linkage is nuclease resistant.

[0379] 41. The antisense oligonucleotide of embodiment 40, wherein at least 50% of the internucleoside linkages within the contiguous nucleotide sequence are phosphorothioate internucleoside linkages or boranophosphate internucleoside linkages.

[0380] 42. The antisense oligonucleotide of embodiment 41, wherein all the internucleoside linkages within the contiguous nucleotide sequence are phosphorothioate internucleoside linkages.

[0381] 43. The antisense oligonucleotide of embodiment 1-42, wherein the antisense oligonucleotide is capable of recruiting RNase H.

[0382] 44. The antisense oligonucleotide of embodiment 43, wherein the antisense oligonucleotide or contiguous nucleotide sequence thereof comprises a gapmer.

[0383] 45. The antisense oligonucleotide of embodiment 43 or 44, wherein the antisense oligonucleotide or contiguous nucleotide sequence thereof consists of or comprises a gapmer of formula 5′-F-G-F′-3′, where region F and F′ independently comprise or consist of 1-7 modified nucleosides and G is a region between 6 and 17 nucleosides which are capable of recruiting RNaseH, such as a region comprising 6 to 17 DNA nucleosides

[0384] 46. The antisense oligonucleotide of embodiment 45 wherein the modified nucleoside is a 2′ sugar modified nucleoside independently selected from the group consisting of 2′-O-alkyl-RNA, 2′-O-methyl-RNA, 2′-alkoxy-RNA, 2′-O-methoxyethyl-RNA, 2′-amino-DNA, 2′-fluoro-DNA, arabino nucleic acid (ANA), 2′-fluoro-ANA and LNA nucleosides.

[0385] 47. The antisense oligonucleotide of embodiment 45 or 46, wherein one or more of the modified nucleosides in region F and F′ is a LNA nucleoside.

[0386] 48. The antisense oligonucleotide of embodiment 47, wherein all the modified nucleosides in region F and F′ are LNA nucleosides.

[0387] 49. The antisense oligonucleotide of embodiment 48, wherein region F and F′ consist of LNA nucleosides.

[0388] 50. The antisense oligonucleotide of embodiment 49, wherein all the modified nucleosides in region F and F′ are oxy-LNA nucleosides.

[0389] 51. The antisense oligonucleotide of embodiment 47, wherein at least one of region F or F′ further comprises at least one 2′ substituted modified nucleoside independently selected from the group consisting of 2′-O-alkyl-RNA, 2′-O-methyl-RNA, 2′-alkoxy-RNA, 2′-O-methoxyethyl-RNA, 2′-amino-DNA and 2′-fluoro-DNA.

[0390] 52. The antisense oligonucleotide of embodiment 47-51, wherein the RNaseH recruiting nucleosides in region G are independently selected from DNA, alpha-L-LNA, C4′ alkylated DNA, ANA and 2′F-ANA and UNA.

[0391] 53. The antisense oligonucleotide of embodiment 52, wherein the nucleosides in region G is DNA and/or alpha-L-LNA nucleosides.

[0392] 54. The antisense oligonucleotide of embodiment 52 or 53, wherein region G consists of at least 75% DNA nucleosides.

[0393] 55. The antisense oligonucleotide according to any one of embodiments 1 to 54, wherein the antisense oligonucleotide, or contiguous nucleotide sequence thereof is selected from the group consisting of TCATttctatCTGT; AATCatttctatctgtaTCT; TCAtttctatctgtATCT; and TCATttctatctGTAT, wherein capital letters represent LNA nucleosides, such as beta-D-oxy LNA nucleosides, lower case letters represent DNA nucleosides, optionally, all LNA C are 5-methyl cytosine, and all the internucleoside linkages are phosphorothioate linkages.

[0394] 56. The oligonucleotide of embodiment 55, wherein the oligonucleotide is selected from CMP ID NO: 15_1; 16_1; 17_1 and 18_1.

[0395] 57. A conjugate comprising the antisense oligonucleotide according to any one of claims 1-56, and at least one conjugate moiety covalently attached to said oligonucleotide.

[0396] 58. The antisense oligonucleotide conjugate of embodiment 57, wherein the conjugate moiety is selected from carbohydrates, cell surface receptor ligands, drug substances, hormones, lipophilic substances, polymers, proteins, peptides, toxins, vitamins, viral proteins or combinations thereof.

[0397] 59. The antisense oligonucleotide conjugate of embodiment 57 or 58, wherein the conjugate moiety is capable of binding to the asialoglycoprotein receptor.

[0398] 60. The antisense oligonucleotide conjugate of any one of embodiments 57-59, comprising a linker which is positioned between the antisense oligonucleotide and the conjugate moiety.

[0399] 61. The antisense oligonucleotide conjugate of embodiment 60, wherein the linker is a physiologically labile linker.

[0400] 62. The antisense oligonucleotide conjugate of embodiment 61, wherein the physiologically labile linker is nuclease susceptible linker.

[0401] 63. The antisense oligonucleotide conjugate of embodiment 61 or 62, wherein the oligonucleotide has the formula D′-F-G-F′ or F-G-F′-D″, wherein F, F′ and G are as defined in embodiments 47-56 and D′ or D″ comprises 1, 2 or 3 DNA nucleosides with phosphorothioate internucleoside linkages.

[0402] 64. A pharmaceutically acceptable salt of the antisense oligonucleotide according to any one of embodiments 1-56 or the conjugate according to any of embodiments 57 to 63.

[0403] 65. A pharmaceutical composition comprising the antisense oligonucleotide of embodiment 1-56 or a conjugate of embodiment 57-63 and a pharmaceutically acceptable diluent, carrier, salt and/or adjuvant.

[0404] 66. A method for manufacturing the antisense oligonucleotide of any one of embodiments 1-56, comprising reacting nucleotide units thereby forming covalently linked contiguous nucleotide units comprised in the oligonucleotide.

[0405] 67. The method of embodiment 66, further comprising reacting the contiguous nucleotide sequence with a non-nucleotide conjugation moiety.

[0406] 68. A method for manufacturing the composition of embodiment 65, comprising mixing the oligonucleotide with a pharmaceutically acceptable diluent, carrier, salt and/or adjuvant.

[0407] 69. An in vivo or in vitro method for reducing ERC1 expression in a target cell which is expressing the mammalianERC1, said method comprising administering an antisense oligonucleotide of embodiments 1-56 or a conjugate of embodiments 57-63 or the pharmaceutically acceptable salt of embodiment 64 or the pharmaceutical composition of embodiment 65 in an effective amount to said cell.

[0408] 70. A method for treating, alleviating or preventing a disease comprising administering a therapeutically or prophylactically effective amount of an antisense oligonucleotide of embodiments 1-56 or a conjugate of embodiments 57-63 or the pharmaceutically acceptable salt of embodiment 64 or the pharmaceutical composition of embodiment 65 to a subject suffering from or susceptible to the disease.

[0409] 71. The antisense oligonucleotide of embodiments 1-56 or a conjugate of embodiments 57-63 or the pharmaceutically acceptable salt of embodiment 64 or the pharmaceutical composition of embodiment 65, for use as a medicament for treatment, alleviation or prevention of a disease in a subject.

[0410] 72. Use of the antisense oligonucleotide of embodiments 1-56 or a conjugate of embodiments 57-63 or the pharmaceutically acceptable salt of embodiment 64 for the preparation of a medicament for treatment, alleviation or prevention of a disease in a subject.

[0411] 73. The method, the antisense oligonucleotide or the use of embodiments 70-72, wherein the disease is associated with in vivo activity of ERC1.

[0412] 74. The method, the antisense oligonucleotide or the use of embodiments 70-73, wherein the disease is associated with overexpression of ERC1 gene and/or abnormal levels of ERC1 protein.

[0413] 75. The method, the antisense oligonucleotide or the use of embodiment 74, wherein the ERC1 gene expression is reduced by at least 30%, or at least or at least 40%, or at least 50%, or at least 60%, or at least 70%, or at least 80%, or at least 90%, or at least 95% compared to the expression without the oligonucleotide of embodiments 1-56 or a conjugate of embodiment 57-63 or the pharmaceutically acceptable salt of embodiment 64 or the pharmaceutical composition of embodiment 65.

[0414] 76. The method, the antisense oligonucleotide or the use of embodiments 70-75, wherein the disease is cancer, selected from thyroid carcinoma, breast cancer, head and neck cancer, colorectal cancer, renal cancer testis cancer, melanoma or metastatic cancer.

[0415] 77. The method, the antisense oligonucleotide or the use of embodiments 70-76, wherein the disease is Dengue virus infection.

[0416] 78. The method, the antisense oligonucleotide or the use of embodiments 70-77, wherein the subject is a mammal.

[0417] 79. The method, the antisense oligonucleotide or the use of embodiment 78, wherein the mammal is human.

### EXAMPLES

### Materials and Methods

[0418] Table 4: list of oligonucleotide motif sequences (indicated by SEQ ID NO), designs of these, as well as specific oligonucleotide compounds (indicated by CMP ID NO) designed based on the motif sequence.

| SEQ | | | | CMP | |
|---|---|---|---|---|---|
| ID | | | Oligonucleotide | ID | Start position on |
| NO | Motif sequence | Design | Compound | NO | SEQ ID NO: 1* |
| 15 | TCATTTCTATCTGT | 4-6-4 | TCATttctatCTGT | 15_1 | 88284, 88378, 88425, |
| | | | | | 88472, 88517, 88656, |
| | | | | | 88703, 88750, 88795, |
| | | | | | 88842, 88889, 88936, |
| | | | | | 88983, 89030, 89077, |
| | | | | | 89124, 89171, 89265, |
| | | | | | 89312, 89359 |
| 16 | AATCATTTCTATCTGTATCT | 4-13-3 | AATCatttctatctgtaTCT | 16_1 | 88374, 88421, 88468, |
| | | | | | 88513, 88652, 88699, |
| | | | | | 88746, 88791, 88838, |
| | | | | | 88885, 88932, 88979, |
| | | | | | 89026, 89073, 89120, |
| | | | | | 89167, 89261, 89308, |
| | | | | | 89355 |
| 17 | TCATTTCTATCTGTATCT | 3-11-4 | TCAtttctatctgtATCT | 17_1 | 88374, 88421, 88468, |
| | | | | | 88513, 88652, 88699, |
| | | | | | 88746, 88791, 88838, |
| | | | | | 88885, 88932, 88979, |
| | | | | | 89026, 89073, 89120, |
| | | | | | 89167, 89261, 89308, |
| | | | | | 89355 |
| 18 | TCATTTCTATCTGTAT | 4-8-4 | TCATttctatctGTAT | 18_1 | 88376, 88423, 88470, |
| | | | | | 88515, 88654, 88701, |
| | | | | | 88748, 88793, 88840, |
| | | | | | 88887, 88934, 88981, |
| | | | | | 89028, 89075, 89122, |
| | | | | | 89169, 89263, 89310, |
| | | | | | 89357 |
| 19 | ACAGTGTTTCAATCAAGTAG | 4-14-2 | ACAGtgtttcaatcaagtAG | 19_1 | 451815 |
| 20 | CAGTGTTTCAATCAAGTA | 4-12-2 | CAGTgtttcaatcaagTA | 20_1 | 451816 |
| 21 | CAGTGTTTCAATCAAG | 4-8-4 | CAGTgtttcaatCAAG | 21_1 | 451818 |
| 22 | GTGTTTCAATCAAG | 4-6-4 | GTGTttcaatCAAG | 22_1 | 451818 |

*multiple numbers refers to repeat targeting compounds
Motif sequences represent the contiguous sequence of nucleobases present in the oligonucleotide.
Designs refer to the gapmer design, F-G-F′, where each number represents the number of consecutive modified nucleosides, e.g2′ modified nucleosides (first number = 5′ flank), followed by the number of DNA nucleosides (second number = gap region), followed by the number of modified nucleosides, e.g 2′ modified nucleosides (third number = 3′ flank), optionally preceded by or followed by further repeated regions of DNA and LNA, which are not necessarily part of the contiguous sequence that is complementary to the target nucleic acid.
Oligonucleotide compounds represent specific designs of a motif sequence. Capital letters represent beta-D-oxy LNA nucleosides, lowercase letters represent DNA nucleosides, all LNA C are 5-methyl cytosine, and 5-methyl DNA cytosines are presented by “e”, all internucleoside linkages are phosphorothioate internucleoside linkages.

### Oligonucleotide Synthesis

[0419] Oligonucleotide synthesis is generally known in the art. Below is a protocol which may be applied. The oligonucleotides of the present invention may have been produced by slightly varying methods in terms of apparatus, support and concentrations used.

[0420] Oligonucleotides are synthesized on uridine universal supports using the phosphoramidite approach on an Oligomaker 48 at 1 μmol scale. At the end of the synthesis, the oligonucleotides are cleaved from the solid support using aqueous ammonia for 5-16 hours at 60° C. The oligonucleotides are purified by reverse phase HPLC (RP-HPLC) or by solid phase extractions and characterized by UPLC, and the molecular mass is further confirmed by ESI-MS.

### Elongation of the Oligonucleotide:

[0421] The coupling of β-cyanoethyl- phosphoramidites (DNA-A(Bz), DNA- G(ibu), DNA- C(Bz), DNA-T, LNA-5-methyl-C(Bz), LNA-A(Bz), LNA- G(dmf), or LNA-T) is performed by using a solution of 0.1 M of the 5′-O-DMT-protected amidite in acetonitrile and DCI (4,5-dicyanoimidazole) in acetonitrile (0.25 M) as activator. For the final cycle a phosphoramidite with desired modifications can be used, e.g. a C6 linker for attaching a conjugate group or a conjugate group as such. Thiolation for introduction of phosphorthioate linkages is carried out by using xanthane hydride (0.01 M in acetonitrile/pyridine 9:1). Phosphordiester linkages can be introduced using 0.02 M iodine in THF/Pyridine/water 7:2:1. The rest of the reagents are the ones typically used for oligonucleotide synthesis.

[0422] For post solid phase synthesis conjugation a commercially available C6 aminolinker phorphoramidite can be used in the last cycle of the solid phase synthesis and after deprotection and cleavage from the solid support the aminolinked deprotected oligonucleotide is isolated. The conjugates are introduced via activation of the functional group using standard synthesis methods.

### Purification by RP-HPLC:

[0423] The crude compounds are purified by preparative RP-HPLC on a Phenomenex Jupiter C18 10μ 150×10 mm column. 0.1 M ammonium acetate pH 8 and acetonitrile is used as buffers at a flow rate of 5 mL/min. The collected fractions are lyophilized to give the purified compound typically as a white solid.

### Abbreviations:

### DCI: 4,5-Dicyanoimidazole

### DCM: Dichloromethane

### DMF: Dimethylformamide

### DMT: 4,4′-Dimethoxytrityl

### THF: Tetrahydrofurane

### Bz: Benzoyl

### Ibu: Isobutyryl

[0424] RP-HPLC: Reverse phase high performance liquid chromatography

### Tₘ Assay:

[0425] Oligonucleotide and RNA target (phosphate linked, PO) duplexes are diluted to 3 mM in 500 ml RNase-free water and mixed with 500 ml 2× Tₘ-buffer (200 mM NaCl, 0.2 mM EDTA, 20 mM Naphosphate, pH 7.0). The solution is heated to 95° C. for 3 min and then allowed to anneal in room temperature for 30 min. The duplex melting temperatures (Tₘ) is measured on a Lambda 40 UV/VIS Spectrophotometer equipped with a Peltier temperature programmer PTP6 using PE Templab software (Perkin Elmer). The temperature is ramped up from 20° C. to 95° C. and then down to 25° C., recording absorption at 260 nm. First derivative and the local maximums of both the melting and annealing are used to assess the duplex Tₘ.

### Example 1—Testing In Vitro Efficacy and Potency

[0426] Oligonucleotides targeting one region as well as oligonucleotides targeting at least three independent regions on ERC1 were tested in an in vitro experiment in HeLa cells. EC50 (potency) and max kd (efficacy) was assessed for the oligonucleotides.

### Cell Lines

[0427] The HeLa cell line was purchased from European Collection of Authenticated Cell Cultures (ECACC) and maintained as recommended by the supplier in a humidified incubator at 37° C. with 5% CO₂. For assays, 2,500 cells/well were seeded in a 96 multi well plate in Eagle's Minimum Essential Medium (Sigma, M4655) with 10% fetal bovine serum (FBS) as recommended by the supplier.

### Oligonucleotide Potency and Efficacy

[0428] Cells were incubated for 24 hours before addition of oligonucleotides. The oligonucleotides were dissolved in PBS and added to the cells at final concentrations of oligonucleotides was of 0.01, 0.031, 0.1, 0.31, 1, 3.21, 10, and 32.1 μM, the final culture volume was 100 μl/well. The cells were harvested 3 days after addition of oligonucleotide compounds and total RNA was extracted using the PureLink Pro 96 RNA Purification kit (Thermo Fisher Scientific), according to the manufacturer's instructions. Target transcript levels were quantified using FAM labeled TaqMan assays from Thermo Fisher Scientific in a multiplex reaction with a VIC labelled GAPDH control probe in a technical duplex and biological triplex set up. TaqMan primer assays for the target transcript of interest ERC1 (Hs01553904 ml) and a house keeping gene GAPDH (4326317E VIC®/MGB probe). EC50 and efficacy of the oligonucleotides are shown in Table 6 as % of control sample.

[0429] EC50 calculations were performed in Graph Pad Prism6. The maximum ERC1 knock down level is shown in Table 5 as % of control.

TABLE 5
EC50 and maximal knock down (Max Kd) % of control

| CMP ID | | | | | |
|---|---|---|---|---|---|
| NO | EC50 | Std | Max kd | std | Start position(s) on SEQ ID NO: 1 |
| 15_1 | 3.13 | 0.53 | 3.84 | 6.16 | 88284, 88378, 88425, 88472, 88517, |
| | | | | | 88656, 88703, 88750, 88795, 88842, |
| | | | | | 88889, 88936, 88983, 89030, 89077, |
| | | | | | 89124, 89171, 89265, 89312, 89359 |
| 16_1 | 0.51 | 0.15 | 0.00 | 6.64 | 88374, 88421, 88468, 88513, 88652, |
| | | | | | 88699, 88746, 88791, 88838, 88885, |
| | | | | | 88932, 88979, 89026, 89073, 89120, |
| | | | | | 89167, 89261, 89308, 89355 |
| 17_1 | 0.39 | 0.03 | 2.85 | 1.75 | 88374, 88421, 88468, 88513, 88652, |
| | | | | | 88699, 88746, 88791, 88838, 88885, |
| | | | | | 88932, 88979, 89026, 89073, 89120, |
| | | | | | 89167, 89261, 89308, 89355 |
| 18_1 | 1.47 | 0.17 | 0.00 | 3.29 | 88376, 88423, 88470, 88515, 88654, |
| | | | | | 88701, 88748, 88793, 88840, 88887, |
| | | | | | 88934, 88981, 89028, 89075, 89122, |
| | | | | | 89169, 89263, 89310, 89357 |
| 19_1 | 0.25 | 0.11 | 73.49 | 3.69 | 451815 |
| 20_1 | 0.71 | 0.13 | 56.53 | 217 | 451816 |
| 21_1 | 2.49 | 0.68 | 334.80 | 6.56 | 451818 |
| 22_1 | 12.29 | NA | 82.19 | NA | 451818 |

The application's sequence listing, which the Patent Office published only in electronic form, follows.

SEQUENCE LISTING (26 sequences)

SEQ ID NO: 1 - DNA, 505425 bp, homo sapiens
gtcggaacgtggacactaatttccgcccacgctccccgcgtcctggcgggatcaccacagacacgacgtccattgctggggtcctcggcgatgcccgtgtgcgcagccccgcgagtctcaggtcagaagaccactaatttcgcggccgcgttccacgaagctaaggggcaaaaaaccagctttcttgggacaaagcgtccccccagcagccagggtcgatcccggcgctgctcccgcggcgcttggctgccccgggcgtaacgggccacgagaagtagggggtggggcgccgcttaggtttgggaagacacgaagcggctcctcgggcttccagcgtccacttcctacggcaagcaggaggagacaagcgccaccctgcgctcgcggagccgaccccggctctcccctcccgtggccgcaggggtcgtgtgtgtgtgtgtgtgagtgtgtgtgtgtgtgcagggacgctccgcgcccatcactctgtttcggtgctaatcgaccgccgtggcgccgatttcccccgcttcccagttcctcacccgcgtgccccggaaggcgcccggaggcccccgggccgccgcgtcacgctcccgggaggctgagggaaagggaggcagccgagccgggagcccggggaggcgcgctgcgccccgcggcggggctgggggcggggctaggtgtctcgcgcagggggcggggcgcggtgacgtcgcgggcgcctgggccgtgctgtggcggcggcggcggcggtagtggcggcggcggcggtgcctgggcggcagcagcagcagtagcggcagccctgaggacggtgagacggccgcggcggcggcgacagcgcggaagtcgcgcgggacccagagcttcccccctgtcgctagtgctgaggctttcgcctttcctacccagcttcttgctcacggcccgggctgggctgggcagggcaacgcgcccccggggaggggcggagctgtaggtgaggcttcgcgaccccctccccctcctcggcagcccggggggtggggaggggcgggccccacccagaccaccggcgcccacccgcgggctccacccagccgggctccgggatcgggcgggagccgaggcggtagatgtggggatcctggggcgggaggtgggggagtggggactggggctctgggcacttggggagcggagggggggaggcttaggactagtgaagccgcggacgaggtagtggggagacggagaaattggggagccatgaggttggggtgcggtcagggtggatctttgggttaggtgagtgatgtaaaatgctgaagatgattcttttcttttcgatgaaatggtgagataaaagatgaagtgtatttcaaaaggacgatgagctgtgcatgttgcctttgaggcagttgcagaacctattttattgcactagatctcacgtttctactttagggttcgattctttttcttctggcggggtgggtggggggtcggagagggaagagaatccccttactttggctcaggtaaattgtgagcgtggatgtatctgaaagttttacaccgaagaagagggagatcttcggtttagacaacttcgttccggcagccaccatttgggtcgcattacgcttagctccttcaaggtggtgtcttccagttttttttccccccaatgcctaaaagatctctttataccacccttttacaggctttatcctggccccttgagagaaggccccaaactcaggtggttgctttggaaggcacattgctgaataatagttgcaggtggttgtggttgactgctttgggtggataaagtgaacaattggaatagttctgttggagctaattatatgaaaaatgcttaaatgttttaaagtacaaccgtcttttatagcgtgttgcttgctcagtacaccttgacttttagacattttgtgttcagtgctaaattgttgaaattttatttctcatttgcagttatgtttcttgcagtctttattaaaacactttaaaatgaaatggaactctttttttttggtaggctcctcaatttctgagaaatgttcttggagtcaagtgctttaaaaacattttgggggcaggtgtgtcactttgtatggaaatattagagtaagcagtgttcaatgttcttcacatcactctttcacaacttagcactgtaaatcagaatcttcttttctggattcttgctccctgttagattacagtattctctggccctacttatcagttagtgtcatttaagctatttcttgttcagaaaacaggtcccatgatggacatgtattatgtaatggatggaagtagacatggctctcaataattcatttatggaggaagagaagctgtcagaaagtgggatttaagcagtgactttcccaaggcttgcctagtttatttgggaaaatagccagagaagtgctttcttgtaacccaaaagagaaatatacagataagaatttcagtagttgcagatcgttgctttttctaagtgcctacttaatgagcagattattgtcttccagcaaatacttctactttatagagaggtatgggaaacaggacataataggtattaagtgagaaagtgtgtgttccaatttttaattataaataaaagatttaattaactgtattcagttaattcatttggtaaagtgaacagttttgactttggattagttagaaggaaaacaaaattgacatatctagttttcgcttttaaattatacatagacttaattaattgggacaaatgtgaactaagatactgggtaaaacttgtgtgtactcctaaaatgacatttgcatggctggtagtaagctgtgattcttgtccttgtaggaatgaaatcacataatttggggaaagtcttaaggtaaaagtaagctatttcgtttagcatttcttgtgcctgaaattatgcctacattttatttttcaaaaaatgttgcttgctagtcattacttgtgatatccttgttgagtctactgaggtgttttttttccttcattacctgtgtcatagataagtatgccagtctgttaattcaacattaatactgcaaacttaaaagtgaaggttcttggccgggcgccgtggctcatgcctgtaatcccagcactttgggaggccgaggcaggcggatcatgaggtcaggagttcgagactagcctggccaacatggtgaaaccctgtctctactaaaaatataagaattagctgggcgtggtggcacatgcctgtaatcccagctactcaggaggctgaggcagaagaattgcttgagcctgggaggcagaggctgcagtgagccgagatcatgccactgcactccagtctgggctacagagcgagattccatctcaaaaaataaaaataaaaattggctgggtgtggtggtgcacacctgtaaccccagctactcaggaagctgaggcaggagaattgcttgaacctgggaggtggagcttgcagtgagccgagattgcaccactgcactccagcctgagtcacggcaaaactccgtctcaaaaaaaaaaaaaaaaaaaaaaaaaaaaagtgaaggttttcatagcaacagctgctcggttttacactatgtttacatttagaagtatgagagttgttaaatgtgtattttacacatatttcatcagaaacattaatggaaaaagatcaagaaatgaagtattttggtttaagaatcagtagtacattgattatcagttttcagagacatatagtaaaataaacttagcatacagattatgtggaatataatttgtttttttttcttatttattttttgtgtgtggaatgtaattgaaatctgttgctcaccaagtctttcagtgtactagagtttgggttctggggtcagagtgcctgagttcaaatcctggctttgccatggtatgatgtagggcaaactgcttaatgttgtttatttcctaaccttaacctgtaccttaatttcttcatctgcaaaatagaaataataacagtagtacctaacctcttaagctggtcaaatgaattaattcatgtatttagaacagtttgggcacataattagctggttcactaacatcatttgaagtttaactgtgtatactatttttacttaataagtatatattaaatacatattatgtaccacatattctagatgctggtatcatagtagtgaacagttctcccagcactttgggaggccgaggtgggaggatggctgggcaacatagcgagaccatgtctctacaaaaataaaaaaattaggccgggtgcggtggctcacgcctgtaatcccagcactttgggaggccaaggcgggcggatcatgaggtcaggggttcgagaccagcctggccagcatggtgaaaccccgtctctactgaaaatacaaacaattagctgggggtggtggcgcgtgcctggaatcctggctactcgcaaggctaaggcaggaaaatctcttgaacccaggaggcggaggttgcagtgagtggagatcgtgctattgcactccagcctgggtgacagagcaagactctgtctcaaaaaaaaaaaaaaaaattagcatggcagtatgtgcctatagtctcagctactcaggagactgaggcaggaggatcacttgaacctaggggttcgaggttgcagtgagctgtcattccgtcgttgcactccagcctgggcgacagagtgagggaaggctatctcaaataaataataaataaataaaagtacgggcagtagtcaggagcttatgctgtattgttccaggtgagggtatctctgaccaaggtgaaatggggaggaggggttggattttgtatgtattttgagggtagacctatagaatttgttggtggttgtttgcgggatgtgggccaaacagaagaataaagaataaggtttttggcctgaataactggaagaataaagttgccagtaactgaattggagatggtaattcatggagcatgtttgtggagaaaccagaagttcagggtgatgtccaggaagagtgagaaatgtggctgttttcagcttctttgtagtatttatgattatgagataggtgagatcatcaggggagtgaattttggtggagaagagatccaaacatctgagcctaggggactgattcattcacttattcattcataagttacttagtgagtatggttcttctaggtacctttttaggcattggggatataaacctgacaaaagttttcaccttcatggaacttaccttctagatacgtgaggggaaatcaagaggaaccagtaaaggagagtgataagaaatcattgagttaggagggaaaccaggggagtatgatattctagaagtgaaggaaaggaagctttcaagaaggagggaacggtcagcggtgtcattgtttaaagttgtgtcagaatgttgagtaagagagaattctgcttgattatgatgtctaataacagggaaatgactaaataagttttagtgtgagatagatgagacaaatgtaagagtcttttagttttttacttctctgttttttttgtttttttttttgagatggagtctctctttgttgcccaggctggagtgcagtggcgcaatctcggctcactgcaatctccgcctcctgggttcacaccattctgcctcagcctccggagtagctgggactacaggtgcccgccaccatgcctggcttttttttttttttttttttttttttgtatttttagtagagacagtgtttcactgtgttagccaggatggtcttgatctcctgacctcatgatccgcgcgccttggcctctcagagtgctgggattacaggcataagcgaccacacctggcctcattctccgggtagatttttaagaaatatttcagccaggcacagtgtcacatgcctgtagttccagctgctctggaggctgaggcaggaggattgcttgagtccaggagatcaaggctgtagtgtgctatgattgcatatgtgtatagccactgcactccagcctgggctacatagtgagaccccatctgtaaattaaaaaaaatcattcttttcagaacaaaataggcaacctgggagtgctaaggaaaggcacatgacttcttattgttgttgttaattttatgtacacttattttaagaaataggtaatatatgtactaaattagaaggtataagagaatacacagttaaaagtctctcctatcccatctagttctttctgaaggcaatcactgtttgcagtttcttgttttttctttttagccagtgaaattttgtgtaataggacattacctattctaaaattgcatacatataagaaacattttatcttccactctgacactgaacactggcaatattttatactttttgagaagggtcttggtctgttactcagtctgaaatgcgatggtgcggttatagcttactgcaaccttgaattcctgggctcaagcgatcttcccacctcagcctccagagtagctgggactgtagccatgtgccaccatgcctggctaattaaaaaaaatttgtagagagacaaggcgtcattatgttgcccaggcactattttagaatagcttatttaaaagatagttttagaagcctgtcaagggaaatagtgactgctaggatcaaacatggattcactaagtcacatcagacagtagttgcctagaattgacttggttacttgactgataaataaaggaaatgcagtagttggaatttatgtatacgtcagctaggctttttcatgtcgtctttgtggaaagtacgaacatatgtgtcctagatttcttgaggacaggaactatctattagatacttattaaatacttgatgaatgaatggatgctagcataataatgtgaattcacaagttgaatacccaggaaataaagaggtgcttgttgaggatcttgggtttgaggaacttggtgttagactcatccatacatttattgaaatgacacaggatggtagcaagactggtggcatagaggataatggcagctgtgaactagttgccagcatatccttactgagtatgggggatgtccaggtggtcattagctgatagtgaagaggtagaggttgaagactgtgctgctgaatagcatgagaattagactaagattttacgtaagggtttgggaatagtggtctggaactggcactggcaggaaggaaggtaccagcctcatttcccagtattgggtgtggagtggaagagactgagtagctttcacttaaaaggactatatgagaagaggtgtcctgattggaaagtcagctttcagttaaggcagagaggtagcaagaacatttcccaaggaagttgaagacttttagaggagtttcttgataaaagaatgaagttccatgagagtgtatttttccaccctattggcttgttatcatcatttaaactttaaaatgtctcttcatcttaataaaaaactccagatttatactttattgctctaagttgctctctgctttacacacttaagagttttctgcatttgctgtgtatctccatttcttcacctgtgacttctcaacctatttctgtcttgtttctatcgccattatttcagtgaaactgaaaatagctagtgaaaatatgtatgaaaatagccaatgtctattttactatcctgttcttatttaacctcttagcagctgtgctagtttctattggctatataacaaattaccccctaacttaagaaacatttattgtttcacagattttgtagatcaggaatgtgggtgcagttggcacctatgattcagggtctctcacaaggctgcagtcatctcaaagcgctacttggggaggctgtttccaagctcactcatgcggcaattggcaggcctgaggtccttgttggctgcttgctggagaggtgagtcccttgccatttgggtttctgcgtacgactacttaaaatatgatatctcagtgcttctgtcttcaaaagaggacagatattagccagaatctttttgtaaccttatcttggaagtgatgtggtatcacttttgttgtattctgttatcagccagtcactaggtccagtgcactcaaggcaggatttcacaattgcatgaatgctgggaggcagagatcactcatagccatttcaggactgtctaccacagcagcatttgacagagcggatacccctccttcctttgtaaagctctctcttctcttgaggtcttcagagcacttttctgtttttcttgctggttctctgggctctttctctgtcacttttttttttttttttttttttttgaggcagagtcttgctctatcgcccaggctggggtgcagtggcacaatcttggctcactgcaacctccgcctcctgggttcaagtgattctcctgccttagcctcttgagtagctgggattacaggtgtgcaccaccacacccagctaatttttgtatttttagtagagatggggtttcaccatgttggccaggctggtctcgaactcctggcctcaggtgatctgtctgccttggcctcccaaagtgttgggattataggcgtgagccaccgtgcctggcctctcagtcaccttttgagtctttctgtgctcatttattaaatgtttgaatttctttgggctttctcatcgctttctatttcatttttcatctgtgtgctgagtattcatttttatgtcttcagtttttacctctctcctgagtctgaggaccactctatcgaattgctactgaatgtttccatttggatgccccttaaaccgaacacatccagaacggaatgtatgattcctacacttcctctggtgtttcttaatttgttaaatgacaccactgggtgcttaagccggaaatgtgtgtggtgttcttgatttctccctctcctccaccttccattttactattgctttttatttttctagagccatggctgttcagtgatggtgtgaatgtttctatgaggtagtgcatcctctgccaggttgcaagcattgaacctggtgctaggtgatttttttttttttttttttttgagatggagtttcactctgtcgccaggctggagtgcaatggtgcaacctccgcctcccgggttcaaacgattcccctgcctcagcctcccgagtagatgggattataggcgtgcaccaccacggccagctaattttgtatttttagtagagacgggatttctccatgttggtcaggctggtctcaaactcctgacctcaggtgatccgcctgtcttggcctcccagagtgctgggattacaggcgtgagccactgtgcccagcccgctaggtgatttttaagattccttccaatcttgagatactgcgtgtgtagctattgaagatttctgagtaggagatgcatgatcagggctgtgcttcagaaaggtggcaactcttgaacagtcatttttagttgttcaccaaagaatgaaactaaacacctgtattctttttaactttattatggtgtgctaagtgatgaatagataatttttatgtgacagcccttttgtatatattagtttcattttttctcattgttaatgcatttatgtttggaagcccttttgcatggaaataagataatcaggccaggcacagtggctcacgcctgtaatcctagcactttggcagactgaggtgggtggatcacttgaggccaggagttcaagaccagcctgagcaacgtggcgaaaccccatctctactaaaaaataaaaaaattagctgggtgtggtggtgcacgcctgtaatcacagccactctggaggctgaggcatgagaattccttgaaccctggaggcggaggttgcagtgaactgggattacaccactgcactccagtctggatgacagagcgagaccctgtctcagaaaaaaaaaaaaaaataacccaatgggatgaaaattttgggatgaaaatttgtgtgaacttaaattaagtgtctctgccatcctggccaacatggtgaaaccccgtctctactaaaaatacaaaaattagctgggtgtggtggtgtgtgcctgtagtcctagctatttgggaagctgaggtgagagaatcgcttgaacctgggacgcacaggttgcagtgagccaaaatcacgccattgcacccagcctggtgacagagcaagattctgtcttaaaacaaaaaaaattaagtgtctgaaattgtaaaaacttctcaagaaataaaattcagaccttaaacataattttactgtaggaatataacttaccttttgaaggaattctttcttgaagccattatttgtgtatttatttatttttaattaacttttttgtttgtttgtttttttgagatggagttttgcccagactggagtgcagtgatgcgatctcgtctcacggcacctcccaggttcaagcgattctcctgcctcagcctcccaagtagctgagattacaggtatgggcaaccacgcctggctaatttttgtttttagtagagatggagtttcaccatgttggctaggctggtctcaaactcctgacctcaggtgatctgctcacctcggcctcccaaagtgctgggattacaggcgtgagccacactgccggtgcttgccaccttgcctggctaattttaaaacttatttttgtggatattgagttttggttttttgtctaggctggcatcgaattcatagcttcaaatgatcctcctgtcttggcctcccaaaatgctgggattacaggcatgagccactgtgtccggccttgaagcccgtcttgaatgtaacacatatgtagaaaagtatgtaaaacaaaagtaaagctttacaatttatgaatcagacacttgtataaccatgatgtaggtcaagcactaggaccttactgacattccacaagctttccttgaagcttcccaatcacaacccagtccttctctcataaaggtaatctctgtcctgattgtaggagaatcaccttctttttttgtgtgtgtagacctttttagttttggcttagttttgattgttttgcatctttatatgcatggaatcatattgtatgtattcatgtctggctttgactcaacattttgtttgtaagatttagatttgtatgtagctgttcgttcattttcattgctaaatagtattccattgtataaatatactacagtttattgtattattgatggatatttaggttgtttctagttttgggctattatggattatgccactatgactattcttgtaaagtcttttttttttttttttttttttcctgagacggagtctcgctctgttgcccaggctggagtgcagtggcgcaatctctgcttactgcaaccaccgtctcctgggttcaagtgattctcctgccccagcctcccgagtagctgggattacaggtgcccaccatcacacccagctgtttttttgtattttaagtagagatgggtgtttgccatgttgaccaggctggtctggaactcctggcttcaaatgatccacctgcctcagcctctcaaagtgctgggatcacaggtgtgagccaccatgcccggctttttttttttttttttttttttttttttttttgagacagtttcactctgtcgcccagactggagtgaagtgttgtgatcatggctcactgcagccttgaccttctgggctcaagtgatcctcccacctcggcctcccaagtaactgggactacaggtgcataccaccatgcttggctaattttttttttttttttggtacttttttgtagagatggagttttactatgctgctcaggctggtcttgaactcctgagctcaagtaatctgcctgccttggtctcccaaagtgctgggactacaggtgtgagccactgcaccttgccttgtgcaagtcttttagtgcatatgtgtatgtaattcttttgtgtatttggccaggagtgaaagtcctgggtcataggatatgcatatgtagaattttagataattgccaaacagtattccttctttgtggttctacaaattacatgccccaaagagtgtttgagagttcattttgttccatatctttgccaatacttagtattgtcactattattaactttagccgttctggtggatttgtagtagtatctcttggttttaatctgcatttcacttattactaatgaggttgaataattttatgttggttacttaggaaaccttttgtgaaatgcttattcacatgtcttgcccaattttatcttttttttcttattataggagttccttatatattttggatatgaccccttctttggttatttgtgttgcaaatatttccaccttactctgtggcttgccatttaagacttcttaaggaggccaggcaccgtggctcatgcctgtaatcccaacactttgggatgctgaggagggtggattgcttgagtccaggagttcgagaccagcctgggcaacatagtgaaaccctatctctatgaaaaatgcaaaaaaaaaaaaaaaaaagactcaaaaaaaaaaagagaaaagaaatgtgttaggaccctaattggactttaattggatttgtagattaatttgggtagaattacttttttgtaatgaggaatctttgactaattcaatatgatatccctgttatttatgttgtatttcatatatctcagtaatgttttatagttttctgtgcagtattacacatcttttgttaaatttagtcctagtatctgatggtattataaatagaattctaagatcaatgttattttccattacttgttggtatattgaaataaaactgaattttgagtgctgactctgtattttgctaatcaagccttataataattttatctgtagattcttttggctttccaacttacataaccatatcatttgtgaataattactgttttctgtttttcttcgcaattcttacacctttttcttttcttcactggctgggatttctggcatgttgttgaatagagataggagacgtcattgtcttttcccatctcaaagggaaatctttcaacttttcattgttaggcatgatgttgtcaagcacacttacacaagacaaggcaaggctaagaccttgcctgtctgatttgactggcaaagacacagagagcctctttagactcagacagtttatctgttacatagtcggcagaaagaagaataagccaaaggttcctgctccctgtgatctttgtcccacataccaaaaaggataacaccacaacaaaaggggctgatgcctgcagtgtgagctgggggatactctgttgatgaggagcctattctaggctgctgctaagtggttttgtattctacagcgctgttctaagttaggcagggctgaaggttcaatgccttgtcagaacccaggatgccatgagaaactgtctcatggcagcttctaaggaagatagggaagaggtgacctgggagagctccatataggccttccaccatctcctgttatgggaggatcacagggcattcctccaagactcagataagctgcaggtcaccagaacaccatggtggaactgtttccctacagatgtttgttatagttgcttttgcacatgtcctttattagattaagaaagtttcctcctatacctagatttttattcattagtaaatgttaaaatgtgtccagtgtgtttcgtatctattggatgcttccccccctttcaacccattattatggccagttacatggatttaaaaattcatttctgctggttaataaatttctttctttttttctttctctttttttttttttttttttttttgagacggagtcttgccctctcgcccaggctggagtgcagtgacgtgatctcggctcactgcaacctccgcctcctgggttcagacaattctcctgcctcagcctcccaagtagctgggattacaggtgcccaccaccacacccagctgatttttgtatttttagcagagatggggtttcaccgtgttggccaggctggtctcaaactcctgaccttgtgatccaaccgccttggccccccaaagtgctgggattacaggtgtgagccaccatgctcagctggttaacacatttctaagcatttttttcctttgaaagattttacttacttgaaaaaaaattgctgttgatgactttcttttctctggctgcctgcctttttctgtgtgtgtgtgtgtgtgtgtgtgtgtgtgtgtgtgtgtgtgtataaattttttttttctcattgttcatatagaattcaggtatagaattcaggttgctgaacttttcaaggaagaaagaccgtatttaacttctgattcatcattaagaagttattaatggtcccagagactcataggggtttcttctgaagtaagaagaagccatgttttacatcttcagatgccacgtaggtgacttttctaccttcatggtagtattcactttactttcattaaaggcaagtaattttgagtacttcaaattagttcccatcccttttctaaactttaaacatttttaaagaaatctttatttattttcacctggggtttcactctgtcacccaggctggagtgcggcagtgctatcatggcttactacagcctcgacctcccaggctcaagcgatcctcttgcatcagccttcgagtagctgggactgcaggagtgcaccaccacacccagctaattttttgtagagatggggttttgccatgttgcccaggctggtctcaaattcctgagcttaagtcatctacccaccttggcctccgagtgttgggattacaggcatgagacaccatacctggccccttttctaaacttttatatgaaatttaggctgaacctttgcttgacgttattctcccttgcatttagatataaagttattaaacagaaaaagttactgaaggtagataattattggctatttcatgtgatttttctggtggttactgtagtcaattttatagtattgccaagtttctgaatccattctgaataatgtgattgtttattcttatgctttgggcctgataatttttgtagagcagcagttcttatctggtttcctgttatttttaaaataaattaattgaaaatgggcataaattatttgttaagtttgaacttgacaaatgcaggtaaagtataatgatattatatttcttctgtacagcaagtatatacatgtatattttaaatcatcaatcaggatttccttccaaagttcagaattaggttttgattcttaacagtttatattaaaattcttattattattactttttttttgagattcttaacagtttatattaaaattcttattacttttttttttttttgagacagagtctcgctctatcgcccaggctggagtgcagtggcatgatcttggctcactgcaacctctgcttcccgggttcaagcaattctctgcctcagcctcccaagtagctgggaatacaggcgcctgccaccacacctggctcatttttgtatttttagtagagacggggtttcaccatcttggccaggctggtcttgaactcctgacctcaggtgatccacccgcctcggcctcccaaagtgctgggattacaggcatgaaccactgcacctggccagtattattactattttttgagacagatttttctcgctcaggctggagctcattgcagcctcgaattcttaggcttaatcaatccttctgcttcaaccttccaagtagctgggactgtaggcatgcgccagcatgcctggcaaatttttttttgtttttgagacagagtgttactctgtcacctaggcgcaatttcagctcactgtagtcttgaccttccactcctaagtgatctacccaccttgcctcctgcatagctgggactacaggggcgtgccaccatgcccagctcatttttgtaattttttttgttttgtttttaagagatggggttttgccgtgttgcccaagttggtctcaaaaccctgggctcaagtgatcccctcaccttggcctcccaaagtgttggtattgcaggcatgtatcactgtatctggccttttctttttttattagagacagggtcttgcagtccaggctggtcttgaactctttggcctcaagtgatcttctgtcttggcctccgaaagccctaggaaacaattcttgtaaatagtatagcaaaaatgtctgctttataaatttttcatttttatagttgttcaagagtacatatgtatttccttttttctttttctcgttcctcattcaaaaaatatggaaaatctaatatacaatatatatgtgtatatagtatatataatatagtatatatatggtgtatagtatatagtgtatatatagtatagtgtgtatatatatgactctgtattgtgttccatcttggcagtacagtgtttgaggcactgtctccgccctcaggatgctggtgaccagggagggagacagtaaacaggcaattacagtagagtgtgataagtgttattgatacgtgcaagaactagaaggtttaaggagtggccaaagaggcttgaaattgggtttggatcatgaagggctttgtaaaccctgttaaaatctgacttttaccttggagcaatggcaagactttggagacttttgagtaaaggaaataacaggagtatatttgtattttacaacaaatggttaagaggaggctatgtgaggaagccaactaggaggctgtggacctgttcccactaaagcctaaaaactaaagtagtgacagtggggatagagacgcgtacagagttaaaagctttaacaggactgggtaattcattctctctctctctctctctctctctctctctctttctctctctctcactgggtaattctctctctctctctctctctctctgtgtgtgtgtgtgtgtgtgtgtgtgtgtacacactttgtggggaaaggacagttagttgatggggaggaagaagactaaagtgactcccagactttcagatggaacccctaggctaggaacagtgctattgggtacagtagccactagccatgtatggccattaaggtatgtctaaactaatttaaataaaataagatttaaaatgcagttattcagttgcactagccacacaaatatagaattacagactcttaaattctgtaaatttcatccagagtactatgaagttataaattcaagagtatgcacagagattcaagcagaaaataatatctggctacatgtgtttaacagcagtatgggactggtggcctctgtattggacagtgcagatatagaacatttctgttacagaaggttcagtgggacagcagtggtctgcagtttttggtttctactttcttttccccgccagaggagagtcagaataacaggtggttttctctcgtctcctaagaactttggttccacagtattctgttgtgtgatattgttacccagggattctgctagataccgttcactactgtcaaccaccatcacccagtcatcaggtataggacgtttctgtaatcagagaaggttcttttggacggcactgagctagagagatggtgatgtcattcatcgagctattgatggttgtggtgggacaacagtagctgccagaaagcgctgtttattagaaatatgagccacatatgtaattaaaaaatttttagtagccacattaaagagtaaaaagaaacaattggattttataacttatttaacacagtatgtccaaaatatgatttacaacacattaaaacatttaaaaattattgatctatttacataattttttttaatttttttgagacaggctcttgctatgttgcccaggctggtctcgaactcctgggctcaagtgatccatccgcttcagcctcccaaagtgctgggattacaggtgtgagccaccatgcccggccacattattttttaatactagctctttgaaatcaattgtatactttcatagtatatcttaattgaaatactaatttttttgttctttcgttattttcaaatgcttagttttatcagaaatatttcatctgtatttatatctgtaaatcataaaatttacagttgaaaaagtagatttatatgcccaggttattccaaacatgcttaaaacttttccagtaatggaattaagtatcggtttttaaagtttcaattcccgtgaaataagaataaaaattcagttcctcggtctcactagccacctttcaagtgctcagcactcagcagctgcatatggctagtggctaccatattggacaacacagctctggaataactgctcactggatggttggaaattcaggtctggagtttaggaaagaggtagcaagacagaagttagaagggaggagctgtgaggaacatggggatttaaaaaaagaagtttgtgactttgagcaaactaattttaaccttggtgctccatttaaaacaaaatcgataaaagcatcttggtgagagtataatagtagatgaatatgcagtatcttgtggtggtaaagatttttttttttttttgagacagagtctctctctgtcgcccaggctggagtgcagcggcactatctcggctcactgcaagctccgcctcccgggttcacgccattctcctgcctcagcctcccgagtagctgggactacaggtgcccgccaccacgcccggctaattttttgtatttttagtagagacagggtttcaccgtgttagccaggatggtcttgatctcctgacctcgtgatccgcccacctcggcctcccaaagtgctgggattacaggcgtgagccaccgcgcccagccaagattttgactttagagtttgatagagctgtgtgatcttgggcaacttactgggcctaatacaatctttctccttgaaaggggtttgctgttgggattaaatgaaatattgtgacaagtgttcactgcatataatacgtatttctttacttttaagttgccatttctttttggtgaggtgtactatcaacttaataattcattctttttagaaaaaaagaaacataatttagttatacatgttaattataagctgcatcccaattcagaaactttaaaatatgaaaaactgtttatcttaaaatattaatattgatgagtgttcattataaactagatactgtgttaaatgctttatatggtgatgtaaaaggtttgatttttataaatatgcaatgtaatatgatatttttgttataaagtttcatttaagtagattctgcaatacaaatctcttctggaaactttaaaatgcatgatggtataactccttttttcagttatttcaggaaccactgaattctgcttgaatctctttggatacttctaaatttatgatttctccaggctaaatctgcagaatttgagtctgtaattctaccttagtgagtacacatataaagaattactatttaaaaaactgccttggtagagtttattcagagaagcgtggtaaccgaggggaggaaaatggacttttccaggtcgaagagaaaggaaatattggctgggtgccatggctcatgcctgtaatcccagcaatttgggaggctgaggtgggcagatcacttgaggtcaggagttcgagaccagcctggccaacatggtaaaaactcatctctactaaaaatacaaaaattagctgggcgtggtggcgggtgcctgtaatcccagctatttgggaagctgaggcaggagaatcgcttgaacccgggaggagaggttgcagtgagccgagatcatgccactgcattccagcctgggtgacagaggaagactctgtctccaaaaaaaaaaaaaagagaaaggaaatatgatttttttttttttttttgacagagagtttcattcttgttgcccaggctgtagtgcaatggcatgatctcatctcactgcaacctccacctcccaggttcaagtgattctcctgcctcagcctcctgagtagctggcattacaggtgtgtaccagcacacctggctaatttttttttattattattagaaatgggtttttaccatgttggccaggctggccttgaactcctgacctcaggtgatccgtccttcttggcctccgaaagtgctgggattaccgaacccggctggctatatgatttttgatgctctgcaaattcttttctgaggtctttttcttaagtctcatcttctggcagtgtgccattccacccgtttcttggagaagaccagaaacatgtttataatgcgtacccatgcgttatatacacagtgtgtactaggaaaccttactgccttatttgtggtagtttcagtagacccactcaggtctgaaataatattaggcattttacatccgtattattggaaataatgaaaaattttatatgtgccaactgcatttggtgatagcaactgcaagtgctgtgttgaaaatgactttgagactaggtacaaaaggatgaagtgttcaccctggaattacagtggctctccttttgtttctgtttaagtcttcttaacatttttcctttttttgttttttgagacaaggtctcactccgtcacccaggctggagtgcagtgttgccatcaccgctcactctcacagcagccttgaccttttgggctcaagctatcctcctacctcagctcccaagtagctgggactacaggcatgcaccaccatgcccggctaattaaaaaaatttttttgtagagacagggtctctccgtattgcccagattggtctcaaactcctaggctcaagcgatctgtctaccttggcctcccaaagtgccaggattacaggtgtgagccaccttgtttggccaacattttcctttttaaataagtagtgtttacctgtttggaaaattttgacaactattaggaaaaaactaggtttcagctcatcttttggctgtgcttatatttgcaaaattgagagtatactgtagattaaaatatattcttgaaggctgggcacagtggctcatgcctgtaatcctagcagtttggaaggtcaagttgggcggatcacctgaggtcagtagttcaagaccagcctggctggttagcctagctaacatggtgaaaccctgtctcccctaaaaatgcaaaaattaactggatatggttgcaaatgcctgtagtcccagctgcttgggaggctgaggcatgagaattgcttgaacccaagaggcagaggttgcaatgagcggagatcaccccactgcactccagcatgggtgacagagtgagactctgaaaaaaaaaaaagcatatcctttttcattattgtgttataaacgttttttaaatggcagacattggtttgtaaatggtttttgtaggcttcatgttaagtcataaagatttcacttaaacatttctcaatgaagtgagtactaataaagctggtgtatctttataaacttttctctacattttggatcatttgagtagattggtttttcctgttcatagaattactggatcaaaagatatgtttttaagacccttactgtaaccattttcaaacttgctgcttctcagatacttttattatttttgggaagaaacaaatacttactgggttcctataatttttcacttaaacccttttaaacttatgatatgcttcagacatgcaaaaagatacagagaatgatgtaattaatatctgtgtatctaccacctagcttaagaaataaacagtcacagacttaaaattcctgtgcagctcttcctgattataaatgtctgtatttaccaacagtgatgtggatatttaatcttttttttttttttttttttgagacagagtcttgctctgtcaacaggctggagtgttgtggcgtgatcttggctccctgcaacctccacctcctgggttcaagctattcttctgcctcagcctcccaagtagctgggactacaggcccagctaattgtatttttagtagagacggggtttcaccatgttggcaaggatggtctcgatctcctgacctcgtggtctgcctgccttggcctcctgaagtgttgggattacaggcgtgagccactgctcccggctgatatttaatcttaaccattaattcaggtctgcgtccaagatcttttggaccagaattcagaatttttttcagatttttagagagatgacatgcatatattatatataagctaacttttcaagtatgttttgggaatggtccctaatttcttcattaaacactttgggattactgacccagtccaggtctggttttactatcatattagttataaatttttggatttttagacatttttgttattcagtcttgtgaatagacgtttgtgaacaggtacatctgttttactttgttcagcttaatcactggtagaatttgttgaactttgtgttgagctgatcacgatgtagtatgagatgtataaaatgcaaggtaacataattttatgtccaaacaatttaatattttaggattttatgaaatcaggttatcagtgagcactagagtcgttggggaaggctacacaacctagaacttgacttgtttcaactaagtggcgcagattgctgttacaactggagaacaactatgattaacaaccttgtgtttatttctaagtatctagcttgacaaaatatttgtcatgatgagaactttgagagaacttataattaacttgattaattgataagaattattaaaaactgcagttaacttgattgtaaactgagttacccttccattaaaaaaaggcgaaatagtaactgacaagtgttaagattgctcgtttacaattgatgtgtcattgctgctccaagcagaggtggcctttcagataggtatgctctgaaacagtgctgctttagccacactgtcgtgtagttttagtctctagtcagtattggagaatcagattaaggttatacaactagatgcgtagtgttagcagacttaatacattttagttacatgctgagtgtagaggcagagaaatctgtgccttcattaacttgtagatttattttctttctgtctttctgtctgtctgtctttgggtctgtctgtcttcctttgtcacccaggctggagtatagtgatgtgatcataggtcgctgcagccttgaactcctgggctcaagctgtcttactgctacagcctcccaagtagctagggctaaagatgtgtgccaccacacctggctaattaaaaaaaaagttttttgtggagacgaggtcttgccgtgttgcccaggctgatctgaagtgatcctttcgccttggcttcccgaagtgttgggattataggcataagccatgtgcctggtgattttttttttttttaaacttcctgctacttacagagatattagcaatctgtctatgcctagcccattaattgctgtgtaaattagtgccgaatggttgtggaggtctttatttaaacctgtagtttataatgagacttaaaaaaatgtaagtttttttttttgtttgtttttgagacagggtttcactctgtttcccatgctgggatgcagtggtgtgttcttggctcactgtagcctctgcctctggagttcaagcaattcttatgactcagcctcctgagtagctgagatcataggcgtgtgccatcatgcctggctaatgttggtatttttggtagagacggggtttcaccatgttgcccaggctggtctcgaactcctgagctcaggagatccacccatcttggcctctcaaagtgttgggattacaggcctgagccaccacaccaggccaaaaaaagtaaagtaatacacactcactataaaaagaaaatggaacagagaagaaaagtatgtaagtaaggaaaaaggtgattccatctggtctttcagaaataggcttttaccgtacaaatcatttctgtgtatatacaaacatacgtgtatatatcctttgtacacaaatgagattgcctcgtaagcattcttctgtaacctggtttttttcccacttcacaatatgtttttgcatgtcagatctatatcttagatatagatatttacttaatttttttttgtttttgtttctttttcctttttttgaaatgaaatctcactgtcacccaggctggagtgcagtggtgcaatctcagctcactgcaacctccgtctcccaggttgaagtgattctcctgcctcagcctcccaagtagctgggatcacaggtgtgcgccaccatgcctggctaatttttgtatttttagtagagatggggtttcaccatgttggctaggctggtcccgaactcctgatctcaagtgatctgccctccttggcctcccaaagtgttgggattacaggcatgacctactgtgccctgcctctttttctttctttttttttttttgagacagtcttgctctgttgcccaggctggagtgcagtggcatgatcttggctcactgcaacctctgcctccggagttcaggcaatcctctcacctgagtaactggtactacaggcacacaccaccttgcccaggtaagttttgtattttggtagagacaggaattcaccatgttgtccaggctggtcttgaactcctgacctcaagtgatctgcccacctcagccttttaaagtgctgggattacaagtatgagccaccatgcctggccattgtttttcttttcttttttttaaattaggattgcctgaaagaaattttttttaaacagcagcattgtcttttgtagttgagagatacataaatttattcaactaatctctttggaaatttaagcggtctccttgctggtacaaacaatgcaataattgaatatcattgcacattatgtccttgaacctgtgaaaatatattttatggagaatattttttaaagtgaaacttctagttcaacaatgtgcacattttaaattttgatagattgtgccaaattgtacctcagtgggattttaaatttttggtttattgttcatcttttcacagggagcctaggatagcagcatatttctcgtccctagtaatatttataaccctttaagaaaatgaacaggatctttaaacatgttgaaatacagtattaaaaatatttgactcgttgatgagcataaccccattacatcaggttgtactagtaattttgagatttatgtgagaatttcacatataattatttaaatagctaatgggtggtatattacatcaggttacatcaggttggactagtaattttgagatttatgtcagaatttcacatataatatttaaatagctaatgggtggtatattacatcaggttggactagtaattttgagatttatgtcagaatttcacatataattatttaaatagctaatgggtggtatattacatcaggttggactagtaattttgagatttatgtcagaatttcacatataattatttaaatagctaatgggtggtatattacatcaggttggactagtgattttgagatttatgtcagaatttcacatataattatttaaatagctaatgggtggtatattacattttctggttcaacttacaaatatagcacatctgtgttagcctagtccattatagttagtttgaagtaaactgctgtgttgctattaaagaatttttttgctttcatttgtcttaatgatatttggtgttcctttggagactcagttcataaagagctattattatttttctaatctatgaggagagtgagagattgctgtctgcagttgcatgttatgctcgtagctatttgtgggaagagtgagaattaaaggctaacatataatcattgtgggtagaagtatttttatttttagacttctgagtataatggatttctgtggggtgaggcgagactggggctgtttttctctcacagtatgtatataaccattgggatcagtgcttttcttttctttttttttttttttttgatttttttggatacactgtttcactctgtcacccaggctggagtgcagtggtgcgatctcgatctcggctcactgcaacctccgcctcctgggttcaggcaattctcctgcctcagcctcccaagtagctgggtttacaggcgtgtaccaccatgcctggctaagttttgtattattagtagagatggggcttcaccatgttagccaggctggtctcaaactcctgacctcaagtgatctgcctgccttggcctcccaaattattgggattataggcgtgagccaccgtgcccggcttcagtgcttttcttagggaaaaatgattctggaatttttgaatatttttatttattatttttttgagatggaatcttgctctgtcacccaggctggagtgcagtggcatgatctcggctcactgcagcctccacatcctgggttcaagtgattctcctgcctcagcctcctgagtagctggggttacaggtatgtgccaccacgcccagctaatttttgtatttttagtagagacggggtttcaccatgctggtcaggctgatctcaaactcctgacctcaggtgatccacccgcctcagcctcccaaagtgctgggattacaggcatgacccaccatgctcgtcctgaatattctttgtgtttttttctgacaggctttgtgatgtgaatagtagtgaattgatagtgaaactgtattgttaataaacacataatttaagataagccagatttctggtaatattcttctcagaattagattttaggaaatttctctaaatgtaaatcctggaaagcttgcagagatttaaatgttgttctggtattttttttttttttttttttgagacggtgtcttgctctgtcacctaggcttggagtacagtggcacagtatctgctcactgcaacctccacctcccgggttcaagcgattctcatgcctcagcctcccaagtagctgggactagaggcgtgcgctatcacaccccgctaatttttgtatttttcgtagagatggagtttcaccatattggccaggctggcctcgagctcctggtctcaggtgatctgcccgcctcagcctcccaaagtgctaggattacaggcgtgagccaccatgcccagcccatctggtatttttaaaaaactcaaaatatagggtacaaaattcatcttaagtgcttggtacatctttagcttggtaggtctctgacatagagtttaatagagatttttttagtattgagaacccatttgtccccacagacatattttctgcgtgtgattgctctgtgtgtatgtgaatttttaatttctttcttagatgagaggcattagtctgtttttgagcttatgccatcttcttggaattaagatttagctacagaagtttgtattcttattaatgcaggaagaacagttttttaaaaaattgaaatcttgcccatttagttaattattttcaggggatagatgacaaaagtaaattgcaagacatgtacagaaggaggttgtcagttcatggaatttgttttatttatttatttttattcagagtctcactctgttgcccaggctggagtgcagtggcatggtctcagctcactgcaacttccacctcccggcttcaagcgattctccaagttgattctcctccctcagcctgtggagctgctgggagtacaggtgtgcgccaccatgcctggctaatttttgtatttttagtagagacggggtttcgccatgttggccaggctggtctcgaactcctgacctcaagtgatccgcctgcctcggcctcccaaagtgctggggttacaggcgtgagccaccacacccagcctaattcataaaatttggatactgtttaaagatagagaaaactttcttaacttgaggaaaatgttaaaaattgctttcattatatttgttttagattacatttagttgcaggttccataaactacattcaagattagtactgctttttaaatgtatatgaactatctaatggtttttacgtggatttaggttaattgtggcgttggcaaacacttactgcctgcttgatttgtattagacactgtgctaggttttggagatggagtaagacattcctttacttttaaggaggtgattaactaaaacaataattacattattttaaaagcccctggttacctcagaggagcacctaaattagactgaggggcatgaaggtttgtgtaggattgtgactgttgaacttagtttggaaaaatgagcagtagttagccagttgatggggcagaagaaggtcatggaaaccagagacagcttggtatttcagggaattgcatagacctgattatggttgtcacgtggagaaggacagtggataagtagtagtttcagagagataggcagggccaaatgatgaaaaatctcatatgcactaccaaggaattcagattaaaaaaaaatattttttgagacaacgtctggctctgtctcccaggctggagtgcagtggcatgatctctgctcactgcaacctccgcctcttgggctgaagttaccttcccacctcagcctcccaagtagttgggattacaggtgtataccacctggcccagctaattttttgtatttttagtagaaacgggattttgccatgttgcccaggccagtcttgaactccttagctcaagtgatcatcctgcctcgggttcccgaagtgctggggttataggtatgagccaccgtgcccagccaagacatttttaaaatgtgagaatacacaagcacacattccattagctgtcagtgggatattatcacatgtcatgtagctctggaaaacactatcatgcacttgtgagagaatcacggtgaaaaaggccaatgacatcatccttttatggaaatagttttgccctcatggacctcctgcaagggggtcttgagcacccctggaatcccttacccatctggagaatcatattagaagatcattatggcactggtgttgagaattgtttagaacctataaaaagaatcacatttatttttgcttttttgagacagggtcttgccatgtcatccacgctgtagtgcagtggaactatcgtggctcgctgtagtgcagtggcactatcatggctcactgtagccatgaactcttgggttcaagcaatcttcctgcctcagcttcctgagtagctgggactgcaggcatgagccactatgctgggctatttttttttttatttttaaattttttttgcagagataggatcttgccgtgttgtccaggctggtcttgaactcctagactcaagcaattctcctgccttgtctcccaaagtgctaggattacaggcatgggccactgtgtcaggccaagaaggacatttcatattgtgatccaatatgcgcactttaaacatcgcagaaaacaagactgtattatctcttgctgctttacaaattacttcaaaacttactggatttaaagaacatctggctggacacagtggctcatgcttgtaaccccagcactttgagagaccaaggcagatggatcgcctgatatcaggagtttgagaccagcctggccaatatggcgaaaccccatctctactaaaaatacagaaattagcagggcctggtggcacatgcctgtaatcccagctacttgggaggctgaggcaggagaatcgcttgaacctgggagacggaggttgcagtgagccaagattgtgctactgcactccagcttgggcaacagagtgagactccttctcaacaaaacaaaacaaaaagaaacaaacatctcagattttatgaagagtatgtattgggtgattctgactcagggtatctagtgaggttgcagtcaagatgttgactgctgagtttacactcatttcaattcttgactgggattggaggatctttgaagctatctcacgtggctgttggcaggagacctcagtttctgaatatgtgactctcttcacagggtagtttgaagtttgagtatcctcacgacatggcagctggattcctgagagagagtgatttgagagagtgacgaagacagaagccccagtgtcttttaagagttagtcatgaaagtacatcattggaagcaagtcattaagtccagtccacactcaaggagaggaaatttagtctccctcttgaagggaggagcattaaataatttatgaacatactttaaaactaccacaaataattgtcaggagaatgaatcttccatgagcttcttatttcttttgtttgagatggagtcctgctctttcacccaggcaggagtgcagtggcgcagtctgggctcactgcagcctccacctcccgggttcaagcgattcttctgcctcagcctcctgagtagctgggattacaggcacatggccaccatgcctggctaatttttgtatttttagtagagacggggtttcaccatgttggccaaactggtctcaaactcctgacctcaagtgatctgcctgtctcagcctcccaaagtgctggggttacaggcatgagccactgcatccagccgagactcttatttcatatacaccctgttgagtgtgccaggaatgcaagcaaggccttgactgttcctaggccaggccatttttcaggattgtgtttgcagcgggccactttgcgggaggaggtaatgtcttccattgggacaaagagcaggcctacttactacttactataaaagtggtggattccggccgggcgcggtggctcatgcctgtaatcccagcactttgggaggccgaggtgggcggtcaggagatcgagaccatcctggctaacatggtgaaaccccgtatctactaaaaatacaaaaaattagccgggcgtggtggcacgcacctgtagtcccagctactcgggaggctgaggcagaagaatggcatgaacccgggaggcggagcttgcagtgagcccagatcgcaccactgcactccagcctgggcgacagaacaagactccgtctcaaaaaaaaaaaaaaaaagtggtggattccctaagcccaatgttccttagctgtgatgcaaacccactgcctgtgtagcatccatctgagcccctccatgtcaccttatgggacttggggataacagggagacagtgcaaacatgttcatgcttgctgcgctgtgagtaataaaagttctttgtgtttgacccaggagactcatgtattctgtcagtatccatgaaatggtcataggctaatgtattaacctgtaagtagggttaaataaaatcctagttccttcacagttctcaacattacttatgtttactttagtgtgatacactgtgaaaataagctatacattttattttctgttctatttatctgtttattttagagatcctatctctattctcctatagataggatcttgctatgttgtccaggctggtcttgaattcctggactcaagcaatcctacttccttggtctcccaaagtgctgggattacaggcacaggctattgtgcctggccaagaagtacattttatattgtgatccagtatgcacatgtgcatgcatatgcacacctgaaacattgcagaaaacaatactgttatctcttgttgcattacaattacttcagaacttactggatttgaaaaacaaacatctcagatttcatgaagagtgtgttgggtgattctggctcagggtatgtagtgattttatttcatttaaaacaaacaagaaaacaagcttggttgcagcttatcaagctgatttcacaacctactattgggtcataattctaagtttgaaaaacactgactggggactgttaccgtttggctgtgtccccagcaatctcatcttgaattgtagttcccataatccctacatgttgtggagggacctggtggtagctgaatcgtggggtcggttaccccatgctgttctgatagtgagtgctcacgagatcgattttattttttcttttttgagacagagtcttgctctgtcacccaggcttgagtgcagtggcataatcttgggtcactgaaacctttgcctcctgggttcaagtgagcacgtctgggtaatatttgtatttttagtagagatagggtttcaccatgttggccaggctggtcttgaactcctgacctcaagtgatccactgaccttggcctcccaaagtgttgggattacaggcgttagccaccgcgcccagcctagatctgatggttttgtaaggggctcttccccctttgcttggcacttcttcctgccgccatgtgaagaaggatgtgtttgcttccccttctgccatgattgtaagcttcttgaggcctccccagccctgcagaactgtgagtcaattaaacctctttcttttataaattacccagtcttatgggtagttctacatagagcttgagaatggactaatacaggactctgaggctagaggcaggcagtcaggttagaaagttgttttaattcaggtaggataggatggcataaaccaaggtaataattgtgggaatggaggaagaggatcaatttaagaggtacctagaaatcaaagcaacaggaattgtattgttttgataatatgtgtgtatatggagtatgaagattttgggaggactctcaggctctggcttgagcagctgatgttattcatgtgaatagatgttgtccactaccatgttctttttttgattttttttttttcccctgcagcagcaggtttggttttggaatggggagaccttgatacggagttcagtttgggggcatggtgtatttgaggtgcatgtgaggagtataagtgaagatgtccagaagtgggatacatagttttgattctcaaaggagaagtaaaaaagtactggagaagtagtgaatttggagtctttgttgtacatatgttattttaagctggtggaggcagggagaaaggatttcttaaggatgatattgtagtgtgagaataacatagggatgaagatcagaaacatttaagggaggaacgaacaaagaaggaggagggttagaagaaaagagcatatgatataaagaaaccaagagaggagagtgtcaaaaaattgggagtgcttaagaaacaagatgtattatagacagaagttaaaaaggcattagagaggaaaagtgttcattaactaaggtttctctggagaagccagagggaatggggactaaagtaccctgtggaaggattagctgtagcccacttccatcagaatagaggaagttaaggatggttgttgctgtcaatgaacatgtggagagagaaagttgagatagttcctgtttgatttctttgtttctctcttatgtaggagatgagatacgtaaatttgatagggctgctgtaagaaagtaccatcagctgggcacggtggctcacgcctgtaatcccagtactttgggaggctgaggcaggcgaatccgttgggcccaggagttcgagaccagactgggcaacatggtgaaaccccacctctaccaaaaatacaaaaattagctgggtgtgctgatgctcgcctgtagtctcagctactcgggtggctgaggtgggagaagtgcttgagcctgggaggttgaggccacggtgagctgtgattgtaccactgcactccagcctgggtgacagaggagaccttgtctcaacaaacaaaaacacaaaacatctcccgcctctccaccccgctccccccacaggtttgaaaccacctgcctgttatttcaaaccacctgtgtgttcacatttttgaggacttttaacctgtttgaccagaatagatactgtctttagaatctcatttttgacaatatgatttacttggtactgttttcaatgaagaaacacttataagaatcaatttacataacaatggattttgggaaaatattgtttaatatgctgaagcctgttgttacttgacctaagccaatgctttgaaatgatgctaggaaatcagagagatctagtttagatctatattgtctttgaaagaagtctataaagttgatagctatagtttagtgggttctgcatccacagctcaaaccacctgtggaccaaaaatatttgggaaagaatcttaaagtcaccttgaaaaaaaaagtggaaaaaaaaaaaaaaagaaaatacttgggaaaaaataatacaacatggaaaaataatacaaataaaaaacacaataagtataacaacgatttacatagcatctacattttattaagtattataagtaatttagagatgatttaaagtatgctggaggatatccataggttttatgcaattactgtgtcattttgaatcagggacttgagcatcctgggatttttgttgtctggggcagtcttggatatctggatacgttctactggagccagtccccagcagataccaagggacaactgcctgtggttttaaaatttgttttagttatacttgtagagtatgaacatgttttcttttttgaaaaaaaaattcaggtgctttatggtagtttgagtgtaaagctttctaagttgagctaaagcctccacaaacatttttcccctttataacacaagtttccttccctctaattatcgctgtttcaaaattggcatttcccgtgtaggaattctttacatactctgtttacagatcattatacttatgttcactgtatttttcacctagcttttggtttatcttttaattttatttacagcattttttggtataatactttgtcattttgacataattaagtgtgttggttgtttttctttatggtttttgcttctggttttttatttaagaagccttttcctaactcaagttcacaaggatattcttcaaaattttcttctagtacttttaatggcttaaaaaatttatatctttaatgtatatggaatttattttggtgtactatgtgaagacgagtatacgttatgtttctcaaagagcaacaagtatttaaacttcatttattgagtgatttttcatttcctcactgtattagtctgttctcatgttgctaatacagacatacccgagactaggtaatttaaaaaggaaagtttttttttttttttttttttgagacggagtctcgctcttgtcacccaggctggagtgcagtggcgcgatctcggctcactgcaatgtctgccgcctgggttcaagcttcttatgcctcagcctcctgagtggctgggattacaggcacctgccaccatgcttggttaatttttgtacttttagtgagattgggttttgccgtgttggtcaggctggtctcgaactcttgatgtcaggtgatccacccgccttggtctcccaaattgctggaattacagatgtaagccactgcaccctgccaggaaagaggtttaatggactctcagttccacatggctggggagacctcacaatcatggcagaaggcgaatgaggagcaaaattatgtcttacatggcgacaggcaagagaacttgtgcaggggaactccaatttataaaactatcagatcccatgagacgcactcactaccaccagaacagtagaggggaaactgcgcccatgattcagttaagtacacctggccccacccttgatacatgaagatgattgcaattcaaggtgagatttgagtggggacacagccaaaccatatcactcactgtttggaaacgttacttttaacatatattaaattcccatatataatttagaccctgttcttgggctagtactatacagttttcgttattatagttttacaaggctacaatactttgtaagaaaccttgcaggtcagatgtggttttgttgtcaggaattttttccagtaatacttagtggacattatgtagtatccagtaatcacacacattgttttcttaatgaaatatatgaagtcacactatgtgggatacatataaacagtaagtaagctcagatcaggtcaaggtttgctgctagatgagttaaaaggaaaatcttattttcagaggtttttggatttttgcagtacaaatgaagaattatggatttgtaatttatgttgctgttgagggctgtcttccttccttgttcatctattttaaattgtttggttactcttgtatctttactctccatttgaattttagagtcagcttgttgagttacttgaaaaatccttcaacacctgtgaaaggaagggatctatagctggttagcaaaatcctgtagagatttttcactgggattgtgctaagtagttggggaagaactaaatcttagcagtgtttgtcttctcatccatgaacacagataactttgtttaggtgttctttcatgtctttcagtaaaatgttatagtttttttcccccaaaattcttgcacatttctgttgatttacatcaaagtacttttatggttttgttgctgttgtgaatgggatttaaaatttcctttaaattaaaaactgcattttctagttgttactactgatgtatacattgatacttatatattgatattgagtttgaccagtttgttgagttctgttattctaataacttgtcagttgattatcttgggttttcagttagcaagtcagatattcagacattgagtttaatcttttccttgtcaatctttatacttcttgtttttttttctttttcttttttgtagacagggtcttgctatgtatcccaggttggtcttgaactcctggcctcaagcgatcttcctaccttggcctcccagagcgctgggattataggcatgagccattgcacttggcactttttttgtttgttttccagttgcatggtatgttttcagcgttcagttttgagacatctaaaatatctctaaaatattgtttactatgagtacattatgctgtaatcacattctgaatgcgtgagtacatacatggtagaagggctagatcttctttaagtgggggtaatggaaagtctctgagaagggaaatatttattattggaggatttaatgtgtgatcttttcattacagatatggtgtaagatacttcttcaagattggacagctggggaccttcttctgattaaccttaaaccaacttgtagccatagagacacctcacaaggttcccatttttgttgttgttgttgttgattttctgctcacacctttcctgaccttgcaaccatgtatggaagtgcccgctctgttgggaaggtggagccgagcagccagagccctgggcgttcacccaggcttccacgttcccctcgcttgggtcaccgtcgaaccaacagtacgggagggagttcgggaagcagtgttggaggtggcagtgggaaaaccctttcaatggaaaatatacaatctttaaatgctgcctatgccacctctggccctatgtatctaagtgaccatgaaaatgtgggttcagaaacacctaaaagcaccatgacacttggccgttctgggggacgtctgccttacggtgttcggatgactgctatgggtagtagccccaatatagctagcagtggggttgctagtgacaccatagcatttggagagcatcacctccctcctgtgagtatggcatccactgtacctcactcccttcgtcaggcgagagataacacaatcatggatctgcagacacagctgaaggaagtattaagagaaaatgatctcttgcggaaggatgtggaagtaaaggagagcaaattgagttcttcaatgaatagcatcaagaccttctggagcccagagctgaagaaggaacgagccctgagaaaagatgaagcttccaaaatcaccatttggaaggaacagtacagagttgtacaggaggaaaaccaggtaagttctacgtgtgtttacctttattggctgaattcatgtatataaatgaaatagcctttttttcccctttcctagatttttcccttcgtagtatatgtatcttcctttttcctattgattttactgttttgtgtcctccatttctcagccctttccaaatttggtcctgtaccctgttttcttctagctgcccatgtctccttgctcccattcttgcttggttcttttctctggtttctctttctcttcgtgtctttcctttcagcatatgttatcttttttttttttttccaattcttctgagagtataattttgccacactctctaatatctattaccaaatgtattttagagtaggtaacttaaatgtaaggtataccattaagatttgtcataatgtcaaaaagtcattcttaaaaacaaaacaaaatgactatcacaggataagtcagtgttgtcagctgagaacagaaattacttttaaaaagttaatgttggccgggtgcaatggctcacacctgtaatcccagcacttgggaggccgaggtgggcggatcattgaggtcaggagttcgagaccagcctggcgacgtggtgaaaccctgactctactaaaaatacaaaaattagccaggtgtgatggcgtgtgcctgtaatcccagcttctaaggaggctgaggcaggagaatcacgtaaacctgggaggcggaggttgcagtgagctgagatcccgccactgcactccagtctggagtgagactctgtctcaaaaaagaaaaaaaagttaatgttgatgatgtatttattaagtacaaacaataagtacctgttctttttgttgccattcatggaagtttaacttcaggatgcttttgtagcttttcgttctgtaattctttacatttaaggtggaggaaaggcaacttggtgtgattgtttacttgtagaaaataaatgagatgactgggcattataattatgggctttgcaatttgagagctaagtgctgtcacattagctacaggaaatattcacttatttttctgtgctcctccaggttatagttgatgtttgatgatagccatgccacattcagtgaggaagctgatgactccaaagatgtgaacaaatcatattcaggctctactagttaaaatgttaaacatactttttttttttttttttttttgagacggagtcttgctctgtctcccaggctgaagtacagtgacgcaatctcagttcgctgcaacctccacctcccaggttcaagtgattctcctgtctcagcctcctgagtagctgggattacaggtgcccgccaccacgcctggctaatatttgtatttttagtagagacggggtttcaccgtgttggccaggctggtctcaaactcctgacctcaggtggtccacctgccttggcctcccgaagtgctgggattataggcgcgagccaccgccaggcccatactttttgtttaaaagacttttagaatttttctcttttcacatttttttcccccatggcccaagttgtctgtacttttagaagttttcttaaacttgcaagcttgagtttttttcctccttaaaaaagctgtcttatactcttaaaggagaatatgtaattagctacctcattgttggtattacactttatttttggattaggttaataaaaattataaagaaagcaactgatatcaatttctgcagtgttcttaaatgatactaagaagtaaagaagcaatcagaaatgatctgtgtctctgatgaagaagtcatctgccacacaaagatgtttaggtcaatgatggacctcatgtatcactgtggtcccataagattacaatatagtgttagccaggtgtggtagctcgcacctgtactcccagcactttgtgaggctgagagggtgcggattggttaaggccaggagtttgagactagcctgggcaaaatggtgaaaccctgtctttgcaaaaaaatagaaaaaaaattagcagggttttgtgatggacgcctgtactacttgggagactgaggcaggaggatcacctgagcctgggaggtcgaggccacagtcagccgagattgggccactgtactccagcctgggtgagagtgagaccctgtctctaaaaacaaaacaaaaaacaaagattataatacagtgttttcactgtatcttttctatgcttagatgtgtttagatacacagatatttaccattgtgttacagttgcctacagtattcaatacagtaacatgctgtacaggtttgtagcctagaagcagtaggctatatcctatatcctaggtgtgtggtaggccgtaccaggtggatttgtataagtccacttgatgatctttgcacagtgatgaaatcgcctttctcagaacatatctctgtcattaagcaacatatgactgtaaatctaatttaagatttcggttgattgtcttaccattcttactattatgcagtccagatattcagatctactgttttggctacttgaagatctctagttacattacattttgtatgttaaagctccagacacattttcagctataaaaatagctcaatttttctgttcataaatataaaacagaaaagcatagatatgaaagcaaaatatattccagatcctcccatctactgacaactttgctattccactgttaacattttgacatttctctttactgaaatatctctatgcatatacacgtaacggatttacctgaatggaatactgttggtattatgctgtgaccttcttttagctaacaacatttctactgtatattagaggcctctaatatatatctaaatcgttatttttaatgcctcctaccattctattgtatctattctagttaatatcacagggccaaaattcttcagatttacttggtagtacaacgcaaattaaaaaccttgaattcatttgaatcagatttctaagtaattagaaattatgataattttattctttctcagatacattataacttcaaactactttgcttttactttttaatcaattattaagttgtcactactcaaaatttgaatgttttaatatacttaaatctctttcttagagacttagcttctttaaagaagagaaattgtcctttaaaaaatattccttagaaagttctttgagtttgagtcattaagactttaagaatgtgtaaagaaagaaaaaaagctaaaatagaccccactgatggggtctaaaattaaggacagggttcttaaatgctggctcagaaacatcagcatcaacaggcatatttggttaaaacatagattgccaggcctcccttcataccagctaagtacaatctctggagatggggtccaggaacttatgtttcgaacaagcttctctggtggttctgatgagaaaccactcttgggatctttagaatttagtaaatctaatctaattcttttttttttttttttgagatggagtctcgctctgtagcccaggctggagtgcagcgatgcgatcttggctcactgcaacctctgcctcctgggtcctggttcaagcagttctcctgcctcagcctccttagtagctgggattacaggtgccccccaccacacctggctaatttttgtattttagtaaagatgaggtttcaccatgttggccaggctggtcttgaactcctgacctcgtgatccgcctgccttggcctcccaaagtgctgggattataggcaggagccactgcgccgggtgtaaatctaagtcttaaacttgtctgttgcctgtttgtcaatttgtgatggttctgttgtggcacttttgagctcaaccatgaaaggaaaagaaacaagggaccatttgctcagtgtgtctcatcctttattctaccactttatatctcagggatgtgacctactcttgttcgtaatgatcattaactgtgacagggaccctcagtggatggggcatgtgtaggggaaaagggtgtttaaaattttagatatgtttagttacaaagagccctccaggtgattttgatgtctcttcaccttgtgaatcattgatgcaccagataaatgttcaaatgatatatgacagcagagcagagaagtacattttcttcagttgacatttttgagttgtcagtacaatactgactttagtttttaatttgcattgcactaccaagtaaattagttgaatttgtcagttgaagtacaacaccaaaaagaataattcctaaatataaaatgatagtacattctcaggtttttttttttaattgttgttgttttgagacagagcctctctatgtcacccaggctggagtgcagtggcgtaaccttggctcactgcaacctccatctccagggttcaagtgactctcctgtctcagcctctggagtagctgggattacaggtgtgtgccaccatgcctggctaattttttttttttttgaaacaagagtctcgctctgttgctcaggctggagtgtggtggcgtgatctcggctcactgcaagctccacctcccgggttaatgccattctcctgcctcagcctcctgagtagctgggactacaggcgcctgccaccacgcccagctaattttttgtattttcagtagagatggagtttcactgtgttagccaggatggtctcaatttcctgacctcatgatccgcccacctcagcctcccaaagtgctgggattataggtatgagccaccgtgcctggccaattttttgtatttttagtagagacgagtttcaccacattgaccagactggtcttgaactctcaacctcaggtaatccacctgccttggcctcccaaagtgttgggatcacagtcatgagccaccgcacccagcctttttttttttttgagctggagtctcagtgttgcccaggctggagcgcaatggcacaatctcggcttactggaagctctgcctcccgggttcaagcgattcttctgcctcaccctcccgagtggccaggattacaggcgtgtgccaccatgcccggctaatttttgtatttttttttttgagacggagtcttgctctgtcgccagctggagtgcagtgacacgatctcagctcactgcaacctccgcctcctgagttcaagcgattctcctgcctcagcctcccaagtagctgggatttcaggcatgtgccaccacgcctggctaattttttgtattttagtagagacgggattttgccattttggccaggctggtctcgaactcctgacctcaggtgatctgcccgcctcaacctcccaaagtgttgggattacaggcatgagtcaccatgcccagcttaaattctgtttttatagtttggtattgaattgtaaatatcaggagaaaaaaatgagtttgctttctttagttttgtggttaagtatcaatataacctaggtcttggaaactgtatctgtatttttaggggttgtattgggttctttttctttttcttggtaaaaatgagattggtaaatttggagtatgtaatggtgtatactagtgcccaaatatgagattctttatatgtatttagataattatcatagtgtatcatatttgaatattatacaatttcaaatgtattgttaataaaaaatcacagtttgatttaattgaaaagtggctgagacataattttttattataagaaatattgtgagctgggtatggtaatatatgcatgtagtcttagctactcaggaggctgaggcaggagaatccctcgagtccaggagtttgagtccagcctgggcaacatagtgagaccttgtctcttaaaaataaataaaaaaataaataaaaatttaaaataattaagaaatattgtggaaaaattgcatgtgaataaacacttctttttaaaggctctacttttcaagaatggattgacagtatatgtgtgtgtcagattatacgtgtgtgtgtgtatcaaatttagagtagatttgaagttactggatttatcaccattatacctggaattagctagtcaccgttataccttgttgatgatgctgaaactatgcccctcactaagatagtttttattatgaagtgactcagaaatgtcaattttaatgaaaaaagttattggcgtacttgttcattttggaataattgaagcaattgtttatgcctgtacttcagaagctgtgtggaaaatacgtaatatcctttctaagtatcagtctgcattcaaagacaaaatatttgaatcttctgaatacttcagttccagtgaaacagtccacaggattttcatgccaaaaaacccatatgtgctgaagaatggtgaacaccgccttatctagattccaccccttgccctaattaaacaccagtgctggcagcgatgcattctccgtatacccactgtaattactacacaatcctaaaattgtataactttggtccaaaaaacgaagggtgcaattttaaagtaaagtgaaacactgcaatgagatacagagacagagaatgctaattaatagattatagtcagccagcagtggggcctaattaaactctgcattcattataccctccatagccctcagaggtcaggcatcttccacttgataaagaagattggtttaataggatttacagtaattaaatggtttccccatttcagtttgagactggggatttaggtccattctaaatattggatctgattggaccatagagatcttgttctaggatcctattagatgtaaagacgcatttgcttagaattacttgatatgtgtggttctttattatggagttcttttagaagatgtttctgatataaatactcagcaatttttatgtctcatccttttgttactgaactttcaaatactgctggttggagagttagaatagtatgtaacagggaaggctttttctttttcttttttaaaattgggagtcaggaaggtttttggtgtatgtttgacaaagaatgaaaatctagctgtgagcttggtggaactgcagagctactaagactttggatggggccgggctcagtggctcatgcctataatcccagcactttgggaggctgaggtgggcggatcacgaggtcaggagatcgagaccatcctggctaacacggtgaaaccccgtctctactaaaaatacaaaaaattagctgagtgtggtggcgggcacctgtagtcccagctactcgggaggctgaggcaggagaatggcgtgaacccgagaggcggagcttgcagtgagctgagatcgcaccactgcactccagcctgggagacagagcatgactccgtctcagaaaaaaaaaaatactttggatgattttttttttaaattctaaacagcatttaaccagattatcatcatactttttaaattatgccttgaaataattctgtatgttaaatttagttggaagcttattttaaaaatgtttatttaaagcactgtcattgaaatatttcatgaacaaaatactgtttaatattataggacggcaggtgaatttaatgttttttgccttgtgtgttgtgtttcttctctttttggagtctgatttttatgttgctcatttacttaggaatcgagaatttctagttcagaactgcaaaaagataaccttgtgtaattctttgtcatttttttttctcattatttggagacttttgactattaacatttatataattttaggttgtatcttgatttgccgcatgataaaagccattattatttgccattaaataaactttttttttttttttttgagacagagttttgctcttgttgcccagcctggagtgcaatggtgcgatctcggctcagtgcagcctccacctcccaggttcaagtgattctcctgcctcagcctcctgagtagctggaactgcaggtgcacgccaccacgcccggctaattttttgtatttttagtagagatggtgtttcgccatgttgggcaggctggtctcaaactcctggcctcaggtgatctgtcaacctcggcctcccaaagtgttgggattacaggtgtgagccactgctcctggccttaaataaactttgtcatgaggttgctagttgtttcactgtcatttaaagtctgatcttaaaatttgggatctatgtcttagattattgttttaattttctttttgataattctgttttaacaaggagatgtagataaattggtatccttgtttattgcccagataagtttaatcttttttgttgtttcagaaggggaatgtgttaaaggcactatgcagagtgccatgagaaaatgaaatcaaatgtaaaatggataatgttccttttggggagttaacaatcatttcgagaagcaaaatttgtacatgtatggcttacagaaatttgaactatgcatttatcaggtcttgatcataggtgaaggtatttaaatcagtgtgggaaatttgcttcttttacagttggtaagtttgcttatctggaatgtagtgaagtatgaaaaataattaagcagagctaataaaaatgttgcacaaatatgagatagggcttatatgaagaaataagggcagagtttgccagataattgcagtttctctctcactttttattttcctctgtctttttggatctcatagtgcagtgtagtgtgtgatctcatctcagtgaaataaaattgtttttagagatttgctaatttacagcaaatttgcagatagcatcttaaatataatttgggggtcctctttattgtgcaaaagaaatcagaaaatgggtttagtttttagttacattaatgttaatcagtggaggtcatagtttcattttttaacatttaaaaccgtaccaccctctggaacttgccatctgttatgagtgcactgttatgcccagaagagtataggaggtgcttagaaaccatactttataagaaatggctgaaggaactcaagaagagaagacttgcaacattttaattatactcttaagtatttggtggacagccatgttgaaggagatttttccttttttctttctttgttagtattgtttttggagaacaaacactggaaaaatgagcacaaatattaaggttttaaattttggctgcaaggaggaatggatttttgaaaaaagctatatccggcctggcgcagtggctcacgtttgtaagcccagcactttgggaggccgaggcgggcagatcatgaggtcaggagatccagagcatcctggctaacatggtgaaaccctgtctctactaaaaatgcaaaaaattagctgggcttggtggcgggcacctatagtcccagctactcgggaggctgaggcaggagaatagcgtgaacccgggaggcggctcttgcagtgagcccgagattgcgccactgcactccagcctgggcgacagagcaagactccgtctcaaaaaaaaaaaaagaaaaagaaaaaaactatttccatttgatgaaagaacagtttcacaaagtaatgcttcatcatcactagaagtggtcactgggaggtcagattgccttctgacagctgcgtgggtgccctaagtcattgaactcttcacaacgcccaagggggtatggcatcaagtggtactttgtggagaaacatttagggagtttaccccatcctcccaggtccttttgtcctttttctccctccccatctcctttccttcttttatgacaattttgttgagatataattgaattcaccctttaaagtatagttttttctttttttttttgagacggagtctcgctctgttgcccaggctggagtgcagtggtgggatctcggctcactgcaacctccgcctcccaggttcaagcagttctctgcctcagcctcccaagcagctgggattacaggcacacgccaccatgccctgctaatttttgtatttttagtagagacagggtttcaccatcttggccagactggtcttgaattcctgacctggtgatctacctgcttcggcctcccaaagtgctaagattacaggcgtgagccactgtgcccagccttttctttcctaatctgatttactcaatgaagattttgaagaaagtaatagtaagttgccctagggagttcttgaacgagggcataaatgatgtaataaaaaatactgttcaggagcagcttttactgctgtcagcagagtggattgaagaaaaggtggggaaaggaaatgagtttcttgtagaagacctggattaaacagggtaataggaatggagaagaaggtgcacatccatgagattttcaaagaaatatttggatataggcagggaacgatggctcgtgcctgtagtcccagcactttgggaggccaaggtgggcaggttacttgagcccaggagttcaagaccagcctcggcaaaatagtgagaccccatctcttaaaaaacaaaattagggccaggcacggtggctcacgcctgtaatcccagcactttgggaggccgaggctggcggatcacgaggtcaggagatcgagaccatcctggctaacatggtgaaaccctgtctctactaaaaatacaaaaaaattagctgggcgtggtggtgggcgcctgtagtcccagctactcgggaggctgaggcaggagaatggcgtgaacccgggaggcggagtttgcagtcagccgaaatcgcaccactgcactccagccctgggtgacagagcgagacgttgtctcaaaaaaaaaaaaaaataaaaataaataaataaataaataaaaaattagctggcatggtggtatgtgcctgtagccccagctacttgggaggctagggcaggaggatagtttgaccgcaggaggtggaagctgcagtgagctgtgagtgcactactgcacttccacctgggtgacagagcaagagtctgtcaaaaaaaaaaagaaagaaaagaaatatttggatatagacggcaagagagaagaatacagtgaaccatggtattgagattggggaactcttttccctacgattaacaacggaaatggattagaaagtggaactaaatttagagtaaggaatgatgaatttggttttaattatttgaataaaagtttttcataagaatttggagataagagactaatgactgtgacctcaggtacatgcatatagatgttataaaggtgtgcttgttaatgttggggaactcacttttctagttaattcagtatcagctacatgcctctgcttatgggagtaagaagtggagagggagaagccattagaagatacagttttatatatatgttctcatccagctcgatttgtgttttggttctctgtctttattgtggtatttttgtttgacagcagataccttgagtgattctctcaattcctgaaagttattatttattaaagttaatactgatttatgatttttttacaaacttctactattagatgtcccttattttgttttagttaacaacaagtttattggagatcatgtacctacctctgttgtgataaattaggagtgactttgggaaaaagagaaatattacaaaaaatgtgctttcagtgaggaaatgataaattttgtttttgaaaatgttcttttcttcccttatggacaagattagaaatgcttttatgaactgtttttgtgctaccatacacatttctaaaaatactcatttttctttttctttttttcttttttctttttttttttttttgagacggagtctcgctctgtcaaccaggctggagtgcagtggcgcaatactccgcctcccgagttcatgtcattctcctgcctcagcctcccgagtagctgagactacaggcacccaccaccatgcccggctaattttttgtatttttagtggagacgggatttcaccgtgttagccgggatggtctccatctcctgacctcgtgatccgcccacctaggcctcccaaagtgctgggtttacaggcgtgagccaccgtgcccggcctaaaaatactcatttttctttccagatttggaaagttagtctttaacgtagatcttttcctttgatttttccatatattaacaatacttactgaaccctttccccctttattttgccagtcttttctacgtaataggctttccttcctaatactggattgcagtgacacttgcttaatttcatatgtggtgactgtataggccgagaaagtgagatagttcagccttaatgtacacagtgtaccatctcttaccggtggctggtagcttatgtactttcagagaatgtggtatgcaaagatctgtgtagctttgaagtcatcctgagataactgctctgatcttaaatgatcctcagatacttgaagagtcctctgtagcagtaattcttaaacttgttggccacaggacctctgtatattgtaaaaattattaaggaccccaagcagcttttgtttatgtaggttatatctaccaatatttgtcatattagatactaaaataaaaaaataatatttattagtacatttagaaacaataaacctaataaatgttatcataagtaacgttttaaaatgaaaaacagttttgcaagtctctctttctttttttttttttttgagacagagcctttgcactgtttcctagactggagtgcagtggcatgatcttggctcactgcagcctccgcctcccgggttcaagtgattctcctgcctcagcctcccaagtaggtgggactacaggcatctgccaccatgcctggctacttttgtatttttagtagagacagggttttgccatgttggccaggctggtctggaactcctgacctcaggtgatccacctgcctcagcctcccaaagtgctgggattacaggcgtgagccaccgtacccagcctagttttgcatgtctctctaaggaaaggaggactacaaatctaaaggccttatgtgggtcttctgcctcttgtaagaggctgccactagagtgctcactaggtcactctttagctgagatctctgttacttgttcagtattgtaataaaatattatgacctgtgacatcaacatggattaacaagtatctggcttcttggtcaagggttaggaagttacactgttctttagtaacagtgagcaatgggaaaatgctgtgagtaatggtgaggaatggtaactttgttgatttgttgttgatagcatgtatttcttgacccttagagaggttctttgggtgggctgtcttaaggaagcccttatattgtagttggctaaccaacaggcctgcgccatcacacccagctaatttttgtatttttagtagagacggggtgttgccatggtggccaggctggtctcaatctccagacctcagatgatccacccgccttggcctcccaaagtgctggcattacaggtgtgagccactgcatctggcctaccagtactagagtctggctctgttgcccaggctggagtgtgcagtggtgtgatctccgctcattgcacgctccgcttcccaggttcacgccattctcctgcctcagcctcccgagtagctgggactacaggcacctaccaccgcgcccagctatttttttgtatttttagtagagacggggtttcaccgtgttagctaggatggtcttaacctccagacctggtgatctgcccgcctcagcttcccgaagtgctgggattacagatgtgagccattgcgcccggcctgttttttttttttttttttctttttttgaaatggagtttagctctgttgcccagatggagtgcagtgacacgatcttggctcactgtaacctccacctcccgggttcaaccggttctcttgcttcagcctccagagtagctgggattacaggcacctgccactatgctcacctaattttggaatttttagtagagacagggtttcactatgccaggtctcaaactcctgaacccaagtgatccacccaccttggcctcccaaagtgctgggattacaggtgtgagccaccgcactcggcctagtatttttaatttttttttttttaaacccagttgcattgtatttatgtgataaacctacagcatttgttgtatttcaaagaagcatttttgggaactaagtttgttttataggacttaaaatttgaaaaattgggagaatacattcaaaaaatgttcttttgattatctttcatggatttgatagcctgcataataagtaatttcttcttttcacatgactcctcttcctgggcataggaacttaaagtaggtactacattcttaggagagaagcatattgtaatgagtgtttccagtctttcctgtcttgtaattttaggagggtctatttcttatttttctatgaaaacatgttatctatggtacagagtatcttctttttctttctttttcttttcttttcttttcttttttttttttttagacagagccttgctctctcgcccaggctggagtgcagtggcgcgatcttggctgattgcaacctttgcctcccgggtctaagcgattctcctacctcagtctcccaagtagcagggactacagacgcctgctaccacgcctggctaatttttgtattttttagtagagacagggtttcaccatattggtcaggctggtctcgaactcctgaccttgtgatctgcctgccttggcctcccaaagtgctgagattacaggcatgagccactgcgcccggcctgtacagagtattttcaagagatgaagcaggtaaaaggttatttacttaaatggtagcagataaatttttggatttctcttggtatttctgatgaaagatacttattttaaagggatagtgtattgggtctcaattgttggaaagttgtgggaacactggctgttagaataactgggggcagaaggtgtttctaggatttagggtggagaggtcttaaagttaccacattcccctcactgcttaggacaggtctgcatactgaaaagctttccctcataccatatgattttcatatgtcttgctaggaatttgataggtgaaaaaaatctgcttatagtcatttgagccaagatcctataactaaataaatgtgtgtaagtgcattagcattgtttgactgaggacgaagttgatagaagattatacttcgttttgtttgtaactttacctagaacttttgccattttggaaaagcacttcaacagcaacattgcattgttgctaatgctactgtctctttagcttctgtttgcatagtcttttggtgtagttgtgccctggcatttacatgttaacatacatactattttattataaattctttcttttcatttttccttcatacagcattatataatttttttttgaaaccgtatgtgggagtgggcttattatctgtgcatttcaggatagtgaagggcatatttacaaaatgtttgttataaaatgggagagtattaagtctgataagcctgaaattcactggtgtcatagatggaacactgaatcaggagagctgcattctagttctgatcctggctttgccaggtgtgtagccatggcagtatttaagcgttttgaatgccagtttcctcatctttaaaacccatagagttggactaggtgatctttagagtctttcttctgaaattacttgattttgtttttgtcagttatcctagtggaattctctaagagtctgttcactttgatcataatgcccaaattcaaaactgattcatatgaccaagttgagtgcttctgggaaggagaaatacatgactaatgaagttcttttcaaggtagatgggagaaaatcagtgtttacatctaaagggcaaagagccttcatgtgaatttcatcagttgacaaatggggatcataatacttgtattgttgttggaatatttaagtgagattaaagaagataatatttataaattatggacaagactacctgacataataggtatgcagataaaagttgaattaaaattaagtcaaacatttcttaaatacaaatacattttataatatattttgaagtatgaaatatacctttcatgatctgctaccagaggcaaacagtagcatgggacctataaaatttttttagaaagtgggtcacagtggataataagtttcatttggataactaatcactaccagcccagccttaatattcctgtaggagttatcaggaactttgagtagagtaattagctctcaggattttcagttacagtcatattcattatttaacatttttatttccacaatgactcatccatgaattatggagtgctttcccaaaaggaatgtagtattgctggaaatgaattttttattgctctattttctttctttggtaaggggttccttgttggttagttgggcccaaaactctccacaaataatttaaaatacgtgcttttgtatgaagatgacttaacaaggcagtggagatttctcttgaatgggcaacatagaatgcttaaattttcttattctgcttattttaaattattaatttttgtactgtggtcctgtactgtgctttttaaattcttacatgataagtgtatgtcactaaaaggtatactttgctcacaatttccctattatttactccactgacattaaaattgtagcattacatctgaggttccctttggtttttatgtatcatttgctgttgtatcctttaaaaaatagtgtaatagatttgtcagtgaaaatgatgtcttactgtgatgctgttatcaaaggcatctctgagtacctatgatagagaactagtgaaggggttaatatctattgtagatatagatgctaatatatctagactcttatagatgctagtaattattatagaacatttatagataccatcctagatgctttcatatacattgcttctaatccttactaacagttctgtaggtaagcaatgttgtcctcatttataggtgaggaaattgaaaattaagagaggaatttgttcaggtttcacatctagcaagtgacagatattggtccgtctggctacaaagccaaatgtcattgtgtttttgactaaggacaaatgaatgaagtgtacatactagtttaaaatatttattgaaaaattaatattcagtcatttattaaatgtaaaagatggcattaaaattcctctgtgttttgttggaggaggaaatacaagaataggtgtatcataggatccaaaggctcctgagaaggggttaacattgagagaaggggtagagaaaagagataataggtgatcagttgagaagatgataaatataatttgattactttaaataatcagtcaacatcagcaggtgtaaatgacatacatcagtacttttcttgttttgattaggcaggaagcagtagagtaatgattcccagacttgcattttgcacactagcaaaataaaatataaataacagaaaaaaagtgggggagactggcataggattgtcaaataaaaacaattaaaaagtgatacatgactacatagtattactgttgttttataaggggaaggtcaatctaacaccaaaggaattgtgcatcattccacaataagagacagttctttcaagaaaatacagattttaactttgtagtgacagttttattaaggcaacttggtcatggactggctttgagaaacattagtttataatagggaacaccacattatagccaaatccttcctacaggagttgtacatcctataagcaaagaatggcttttacatttttaaatgattaaaaaattaatatattgtgatatgtgaaaattatatgaaattcaaaattcagtgtgcataaataaagttttattgggacacagctatgtttatttttgtattatatatggctgctttcacaccagtggtagatagagtagttgtgatagagtctatatgacttactagacctgaaatacagtgtctactctctggccttttacaaagtttttcaatactttgtttggataacagagtaaataataatagctaacacttgtgtagtgtttactaagaaacaggccctgttttatgtgctctatgttattaaccatcataacaattttatgaggtaggtactgtttattgaagtggaaactgaggctgagagtaagttgcccaaggtcacatggctgttaggtggcagaggcagccttctgcctagatggtgccactccacggtacatgcttcatcactgcacttggctagcagagaaggaaatcagagacttcaggatgtgacgcacccttcacatttgccgtagttgttttaggaaaagaggaaagtagccttattctatagttgcctgaagtgttatcactgagtagttgaatgaagaattcagcattaattacttcatgatgcatgaacatttggtgtatttttatgtgacccagtggattttccccagaggtctgttgattgaaatgtcctacttattgatgtcctacttattgaacttttgaacaaataaatctgttatttctgaactattgagttcatttttggtataattagaataataaattacactattaacttggtggagggtaactgtttctctatcataaatatttatcgtgttgttcttaaggagcataaggcataagccccccgtcattgatttaatttaaaaataaaacatttattgacacatacagaaatattttaattaaaaattgttaaatggcttttttaatgtctatatatattctaccccccaccccccaaaaaaagccattgtatgccaaagcccgaaagaagaattacattaccagtagttggatttttggctgaatctattcaaggggaaatcactattttcgttttagagatggctttgggtggaggaggtaaggtttcaagaactggttgaatgaaagaatattgacaagtaagtgaataaactagaattagtgtgaccacttctgatttctcaaataatgtgtttacaaacagtgttcctacattgtaatggcagtataaaatgctgatttaaataaatagaagtttagtggctacactttttcttagttaaacctcactatattctggatttaaaaatgacagtaactaatgttagttttgtgctcctctgaaggttagaaacctgttatatgtgtctaaaacgggttttaatgggtttaagaccacagagaagataggactgacactttagtaagattctttttttcaatctatttaattgttctatgattttaccttattcaaggtgatggagggtgaattagggtgggtaaagggtagggggaattgagacagtggttaaggttgatttttgacttgtagttcgctttcatctttaaattgtggaagtcgccttcctttgttcattttgaagttttgggcaaaatgttctcaggctagatgcaggtaatgcaggtaacagcggccagcacttcccatactagagggcgttgactttctcaaagtgttgactcgtttgtgatgtttttgcatttgtttggtttctgtttgctgctatgttgttgctcttcccagtatgggatagggttatggtattagtagaattacagtgttagtggtttttcttcctcttcccattccatccataaccttgacactcataattttgaaacctatcgttcattacaagggttaaaatctaaaatgtgactgtgcaggttgagatggcatgttacagctcctgccacctctttttcttgtgacagatggcttcccctcctggttgtaatccactgctgatttttttcaaagagcgaataccatgtgttccccattttggctctggttgtgttctgcccactcattggcttcagaggatcttgaaacaggaggtacttgctgctggcatttatggcaggaagtggatacaattgcgatactttgtgccaagtgttcatttattagaaaaattgtgcttcctaaaattaaacattatttctctgtcacatcaagagtaaagctaaattttattactttttagaatatgcttttcccttaatgttgtattataaaaattttttggtggcaaatttattacaaaatagatttttaaatctgaatttcacatactcaaagatttatagtctgtgcaagacattgaatgagtagctctaattgcactagtataatataattacgaaagggatctgtatcacagagacttctgatcacagaaacagttggaattgtttgtgatgtgtggtattgaacttgtgattgcatatgctttgtggtacctatagacagtagtgtttgtctattttaactctcttgcttcggatctccccttgagtagattcagctaaataagttataaatttcaccatcttaggccttcttgaaaattataagtatctgagacagcttaatttcataaagctactgtgcatatttggaagtatggtgtttggttttttaaaaaaacctggcaggccagagtaagcaaattgtttttttatgtttttgtcaagaaacaccccaagataaatgtaaacaaatatttgcgcattaccgtcattgatactggaatttgacatttctgtcctcagaagtcactgttctgtcagagtctgctgtacttgcctgagtgaatagtgcaggattggcaaaaacgttgcctgctcatggcagatcatctctaaatctctcttgacaacatctctagctgaacccagatcagtgattctcaaccttggctgcatattggtatcactgagaaacttaaaaaacaaacaaaccaaaacctgatgcctgagtctcacccaaaccctcagataatttgatttgattgggcttgggggtggtcttgctgtggagatttaaaaaatctccccaggtcattctaatgtgaagtcaaggttggttgagaaccactggctactacaaatggataagagttggtagtgtgaactgaaatgtatttgccatcctcagtctagtgaggggattttctaaccatgccacaatatataaacaatttgcagtttgaatggatagaggttggttatcattggaatttgaaaggacaaatgacaagtaacatcggatgatttaccagtgttttgtgatcttttttttttttttttttttttaagatggagtctcactcttgttgcccaggctggagtgcaatggtacgatctcagctcactgcaacctccacctcccgggttcaagcgattctcctgtctcagcctcctgatttacaggcatgtgccaccatgcccggctaattttgtatttttagtagagacagggttttaccatgttggccaggctggtctcaaactcctgacctcaggtgatccgcccgcctcggcctcccaaagtgctgggattacaggcgtgagccactgcgcccggccaatgacattttaaaagaattgccttcagagggtagctggaaaagcaaatggatgtgggacaagaggttgttccacaacctcctggggtggggatacccgttctgtgatggcattaaggagaacgagagggctgagaagagagcaaaatgatcagccctggattttgggacttggccaaaaaagaaaggatggaacaggacgtcaggataagatctaagacttgaagcagaaactgtacttcttcctgacccaggaggtgtgagacagggaagtggtggtagcaaacaggatagaatgagaggttcccttttacacccaaacttgttctttgcttagtggcagaaggctcaatttttctttattagagcattttctttattacagcactatgagctttactatatgtgaatcacctgtgagcacttgttaaaatttctggatccctcccaaagtttctggtttaggactgctgggggaaggctcaggaatctgtatttgtgaaggttaactgaaccttttttgtttgcttaccatctattcagtgttttccctattctttgttctatttatttagtaatttaaaaaattgactcattttaaaaaactgaatcttattttaaaatgaaactgtcactactacacgtggaaaacatttgccaaaaaataaaaaatgaaagtgtaaatacataactattaagaaaaaggtcaggccgagcactttgggaggccgaggcgggttgatcacgaggtgaaggaatcgagaccatcctggccaacatggtgaaaccccatctctacaaaaaaatgcaaaaattagctgagcgtggtggcgcgttcctgtagtcccagctactagagaggctgaggcaggagaatcgcttgaacccgggaggcggaagttgcagtgagccgagattgtgccactgcactccagcctggcaacagagtgagactcagtctcaaaaaaaaaagtcatatatgtaccactctgaagattatttttaatatcattttgggaactactagcgattctgatacagatagttttgtcatcatacttggagaaatattgaactagagacaaaaagtttcacttagattgcatgattttcagctactgttgcacacttggaatctggggcatttttaaaatacttttggtcagcccccatcccccgatttaattggtgtgggctacaacctggacatcaggatttttaaaacactctcctaaggtaatcgtaatgtatattctgggttgaggatttagaggttaaaaagcatataatgcagttagactaagaagcataaattcatgaatactaaaatacacttatctcggtataattagaaataaagaagactggctgggcatggtggctcatgcctgtaatcccagtggtttgggaggccgaggcaggaggatcacttgaggcgaggagtttgagaccagcaagggctacatagcaaggcctcgtctctaccccaaaaaaaaaaaaaaaaaaaaaaaaagggcagaagaaaaattagacaggtacagtggtaggtgcctgcaaatcccagctactcaggaggctaaggtgggaggattgctggagtccaggaggttgaggctgcagtgagtcctgatcctgtcactgcactccagcctgggtgacagagcgagaccctgtctcttataacaagaatgaaaaacaccacagtgaccacctgggggatgtgggcagggggagaggaaaagaaggtgaattaataaagcactaaggcaccgtgtccttatgatcgcctctgctcctgcctgcttctcttgttttctgttcttgatgaatagcgtgaattaataaagcactaaggcaccgtgtccttatgatcgcctctgctcctgcctgcttctcttgttttctgttcttgatgaatagtgtgaattaataaagcactaaggcaccgtgtccttatgatcgcctctgctcctgcctgcttctcttgttttctgttcttgatgaatagcaagagcttttaaattgtcagctagtccccaaacgtaagtgtgcatcagaattaactggagggtttgttaaaacacagattgctgggactcatcctcagaatttctgatcgagtaggtctggggtggggcacaagatttaatttcccaggtgatgcttctgctgctggtcagggaacaacacttgaaacactcatctagttaaccaagctgaaaactttaggacattagcctgacatttattgtctctgtgtattttatatatatccagtgaactttaaaaataattacgtaaacacaaacctgtgtttccatcacctagaattagtaaatgttaatgggtgtgtggataaatattaattatgaataaatattgcctttttggtgataataaaccgctgtgttttatttcacacttttgagtacaaggaataaaaaaatacaacttttctgggcttgagataagtgctctttaggttaagctataacaccgaagagaaaatagtgctccattaacttgtttcatcagtcttttaggcaaccaaatgagaaaagcaaagaaaaacagtacagtctagattgtatactccatctgagaaaaaacattaaaaagtattacgtatctgaaaatgaaattgtcggacaggcgcggtggctcatgcctatagtcccagcattttgggaggcggaggagggcggatcacctgaggtcgggagttcaagatcagcctggccaacatggtgaaaccccgtctccactaaaaatacaaaaattagccggacatggtggcaggcgcctgcaatcccagctactcaggaggctgaggcaggagaatttcttgaacccaggaggtggaggttgccgtgagccaagatggtgccgttgcactccagtctgggcaacaagagtgaaactatgtctcgaaaaaaaaaaaaattgtcagctgcaatcattttatcctgtttttctgtttgaatagtttatttgaatagttcatggaattaataagttgaatttatttctatatctagaaacttgggaggggaagggtaaactgttatgtatggtataaaaaatttaaaagtgttgtgaaaatactattttcaattctaaaacgcttgttcaattctaaaatgacttgtttcccctatgcttgatatagatcaagagggaaaaagtattaatgggtattatttattcagcaaacattgagtttacattcaggactgtcaacttgactatggaacaattcaagtagctttcgttagtcttgcctagcttttcgttatgcattaaatatgtgcttcattcaggaggagatcaccccaccccagccaggttagttttgtcaggtagaaataatgctgtttttatattctcatgaagagtgtatgtattttttcatcgtggagctaatgctaggattccctgaacttgctagcttctataaatcctcctcaccattcttcgaagcaagggctttggaaagtatggacttaactgtctcatgaaaatccttgtatagcttcaattgtcctccctcctatttatttttcatgaaattattctcttgacacacttgtttattttctatttagtctttctagactcttctatttgcttccttcttggactatttgttccctcttgctagaactctttatcttcactcattaactaaactttaagaaaagagtccttcccatgtttcctttaacagggaggccagcttgtttttacagctcatataatatatgcaggtagtagaagacagatgaaagcaaatactttgcaaattatggtatgtttgcttcagttttcaaaaagtctgggagcttggtctcttttccctggaaaccacctctgttttgtcttgcagatgagagtgtgatctttaagctagccttgaccttttgggtggtctgtgcttatctttcaagtgtttgcagtaattaggaccagtatatcaaaaaaagcatgctacctatgttatttgtattgtcctgatcttctagattcagaaaaaaagagaggttattatttttataactggatttcctatatttgtggataagaattccaaaactaacaaagagaaaatcatcttgactgttacgtgctgtaaaaatcatgtattcaaagtttgtactatcacaattctggattcatgaggatttgccagacattcaaattaaagcctaatcaataactttcttcttcgtagagggccattctaaggccagtgctttcccagggcctgggtatattatgtagtatgatgaatatcacagagcaattgcccttgtttaggaactgtgtattgggattcctttaagatttttgttttaacatacttacatttcactaggattcttccctaccgcacccccggctctttttaaaaaatttacctagtttgtcccttgcctgtttggctactagatatatttaactgaccttagacagtgctgcaggcagagttcagcatttaggcaaaacggatggcagtgttagctgtttttctcctggcatgtcactgtgcattatctgggatggcatgctttgtgagtatctgtatggtttcccaatgagagaagggaggtctggctgcattcactcgcacaaggtgacctttgtttctacacattctctgctttaacaaagcattgtctaatcagtctgtcaatacatatttattgagtgcctactgtgaatgcccagtagtatgctgtgtactttgagagatttttttcaaaagggggcagggtagaaagaaagagaaatatgcatttgagtttagaataatgttaacatgaaatatgtataccgtgtgtgattttataaacatgaatttctggaggagcagaattctagagtattctggcccacattagcttcaagaatggaattattcttaagagtaaaatcacttaagctagaagttccaggctgctgtgagcagtgcctctacactccagccttggtgacaggagacccctacctaaaacaaaacaaaacaaaacaaaaaaagaatgaactgtttcctcattaaggtgcaacttattcatgtaagagagatgtttaatgttaaggatttcctttcctttccttttttctttcctttttctttcttctttcctttcttttctttgacagagtctcactctatcacccaggctggagtgcagtggcgcgatctctgttcactgcaacctctgcttcccggcttcaagcaattcttgtgcctcagcctccccagtagctgggactacagtcatgtgccactacacccggctaatttttgtatttttagtagagatggggttttgccatgttgcccaggctggtctcgaactcctgacctcaaatgatctgcccacctcagcctcccaaggtgctgggattacaggcgtgaaccaccatacttggcctgttaaggatttctttaaatgtggtatttgatatataggcttacacaattagtatatcttaaattatgtaatgaatttcccacaatctcagcatttaaaaaaatgtttggaataggaagatgctcataatattttaggggaaatacatgtatatatagtgtatatatgtatgtatacaatgatcaatctttggagcagcatagtgtaaaaagcgcaagctacggagtcagactgctggatggttctgccacttcaactgacctagggacaggtagattttattatttgtttccttttttgtaaaatgaaaataatggtacatcatgggtgagatgtaaactttaaatgagttagaatgcataaagcattcagaaaaggagctggctgggcgtgggtggctcatgtctgtaatcccagcactttgggaggcccatggcgggagaattgcttgagcccaggaatttgagaccagcctgggcaacataatgagacccctgtctctaaaaaataaaataaaataaatgaaaataaaaataaaaatagaacatggtctggcctgtggaaaacattaattgttacttttattgtagcctttttttttttttaaaaaaaaggtgaatgtcagcagagaaaaactgttttaaaggatatccataaaattttttttgtgatttttctcagattcataggattattaatttttctttttatctgtaattcctttttcccccgtaatgaacacgtttctagtgtaataaagtagaagataatgaagaataagatttagtctgaatatttatatgaatccttatgaagaagtgtcgttgtctgtcattgatacccaagatttgttgtctcacggccatggaaaactaggacgcagacacacaaagagtgaggttcagagtggaagtttaataggcaaaagaaagagaagagctctctgcgacagagatgggtcctggagaggctggtcctggttctgcggtggaatgcaaggggttttatagataagcttgaggaggtggtgtcatgatttacatagggcatgaaagattggttggaccaggtgtgccattctggaaaactggttagggctaggtgttccatttgcctagggtgcaaaaatctggccacccccaccctaatcttttattatgcagatggcttctctgtctgcccagcgcagtgtctgtttctttactatacatgtggtgacaaagaaaagggaaggtgaagcctccatgttgaacatacctggcccccaggtagccgttttctgttagcatagctgctgacattcacccatgcaagcttccagcttgcttttttatgtttgcagcatgatttttcaggctgctctttgttagaaaagaaattcttttggggctgctttttgttaaaaggggaaattacgccgaggactctattgcccttattatctgcgtaaataatttctttctacctcctgtatcaatgatacaacaaaatctagaatttgttgccaggaaattagtaaatatttgaatgatattgaatggtctacataggtgatgttattttatcttgaagctgttcataatttagcataggaaacatggcaaacatggcagaaataccatggatcatatgcttgttttatttttagtgtttttttgtttgtttgttttgttttttttgagacagtctctcactttgtcagcgcgatctctcggctcactgcaaccaccgcctccagggctcaagtgattctcctgcctcagcctcctgagtagctgggattacaggcgtacatcaccacacctagctaatttttgtgtttttagtagagactgggtttcgccctgttggccagggtggtctcaaactcctggcctcaagcagtccatcttccttggcctcctggaaagcgctgggcttacaggcatgagccactgcgcccagcctgtatatcttcttttgagaactgtctgtttaaaatataaatgaaaataaaaatagaacaggggctggcctgcagtaagcattaattatgacttttattgtactttttttttaaaaaggtgaatatcagcatagcaaaactgttttgaaggatgcgcatggtttttttttttttttttttttttttccttgaggtggagtcttgctacgttgccaggctgaagtgcagtggcttgatttcggctcactgcaacctctgcttcccgggttcaagcgattcccctgcctcagcctccttagtagctgggattacaggcacttgccaccacgcccagctaattttggtatttttagtagaggtggggtttcaccatatttgccaggatgctctcgatattctgacctcgtgatccacctgcctcggcctcccaaagtactgggattacaagcgtgagccaccgcacccggcctaaaatttttttttagtgatttttctcaggtgtgtaggattattagattatttagatccttagatctagactatttagatcctttgcccattttaaaatcagattaggttttttttgttttgttttgtttttgtttttttgtttgtttttgctgttgagttgtttgaattcattttatattctggatattagtcccttctcggatgcatagtttgcagatgttttctctcattctgcagattgtctcttcactctgttgattgtttcctttgctgtgcagaagctttttaagtttgttatagtcccatttgtctattttggttttctcaccagtgcttttgaaaccttaccaagaaagtcttttcctagaccagtgtcctcaagtgtttcccctacatttttttttctaatagttttatatgaatagtttcaggtcttacatttaagtctttaatcagttttgagttgactattgcgtttggtaaaaggtaggggtctaatttaatttttctgcatgtggatatccagttttcccagtactatctattgaagagggcgtccttttcccaaagtatggttttggctcttttgttgaaaatcagttggctgtaaatatgtggatttatttctaggttctctgttctgtcctattggtctatgtgtctgtttttataccagcaccatgctgttttggttactatagctttgtagtgtattttgaagtcacatagtgtgatgtcttctgctttgttcttttttgttcattattgctttggctattcagggtctttctggttccatataaacttgagaattgtttttttatttctctgaagaatatcattgatattttgatatggattgcattgaatctatagtttgctttggaaagtatgttttttttttttttttttaagagacgaggtcttgctctctcatcccagctacagtgtagtagtatgatcatagctcactgaaacctcaaactcttgggctcaaatgattctcccacatcagcctcccatgtagctgggatgacagtggtcattttaacagcattcttcctatccatgaacatgggatgtctttccaattttttttgtgtcctcttcaatttcttttatcagtattttgtaattttcattgtagagctctttcaccttcttggttcaatttattcttagagtttgttgttgtagcttattgtaaatgggattgcattcttggttacttttttagctggtttgttattggtgtatggaaatgctactgatttttatatgttgattttttatcctgcaactttagtgaatttgtttataagttctaagattgttttgatggagtctttaggtttttctagatataagaacatgttgtctgcaaacagggacatttgactgcctcttttgcaatctggatgccctttatttttttctctagcctaagtgctctggctgggacttccagtactatgttgagtaagaatggtgaaaagttggcatacttgtctggttctagttcttagaggaaatgcattcagcttttccctattaagtgtgatgttagctgtcactttgtcatatgtggccttgattatgttgaggtatgttcctttattgcctagtttattgagagtttttatcaggaaggtatgttgaattttatccaatgtttttttctgcatctattgagataatcatatggattttgtcattcatgctgttgatgtgctatattacatttatcgttttgtgtatgttgaaccatccttgcatccctgggataaatcccactttgtcttggtgtattgtcttttgaatgtgctgttggattttgtttgctagtatgttgttgaggatttttgcatctgtgttcatcagggatattgaccatagtttttgttgtttctgtacccttgtctggttttcgcatcaaggtaatgctggctggccctatagagtaagttacaaagaattacccctcttcagcttttgggaatagtttgagaagaattggtgttagttctttaaaagttttgtagaatttagcattaaagctatctgatccagggtttcctttgttgagagactttttattaaaattgattcagtcttgttacttggtgttgttctgttcaggtttactacttgtattagtctgttttcatgctggctgatgaagacatactgagactggagagaaaaagaggtttaattggacttatagttccacatggctggggaggcctcagaatcatggtgggaggcaaaggccacttcttttttttttactattatactttaagttttagggtacatgtgcacaatgtgcaggttagttacatatgtatacatgtgccatgctggtgtgctgcacccattaactcgtcatttagcattaggtatatctcctaatgctaaccctccccccttcccccaccccacaacagtccccagagtgtgatgttccccttcctgtgtccatgtgttctcattgttcaattcccatctatgagtgagaacatgcggtgtttggttttttgtccttgtgatagtttactgagaatgatggtttccagttgcatccatgtccctacaaaggacatgaactcatcattttttacggctgcatagtattccatggtgtatatgaaaaggcacttcttacattgaggcggcaagagaaaaatgaggaagaagcaaaagcggaaacccctgataaacccatcagatctcatgagacttattcactatcacaagaatagcatgggaaagactggccccatgattcagttaccttcccttgggtccttcacataacgtgggaaatttttttttttttttttttgagacggagtctcgctttgttgcccaggctggagtgcagtggtgcgatctcggctcactgcaagctctgcctcctgggttcacgccattctcctgcctcagcctcctgagtagctgggactacaggtgcccaccaccacgcctggctaattttttttgcatttttagtagaacgaggtttcaccgtgttagccaggatgatctcgatctcctgaccgcgtgatccacctgcctcgggccccccaaagtgctgggattacaggcgtgagccaccacgcctggccacatgtgggaattcttggagatacaattcatgttgagatttgggtatagtacactatatcactgcttcttcctggtccgatcttggcaagttctatatatccaggaatttatccattccttctaggttttccaatttgttggtgtatagttgttcataatggcgtctaatgattctttgtatttctgtggtttcctttttcatttcagattttgtttgagtcttctctcttcttagtctagctaatggtttgtggattttgcttatcttttcaaaaaaccaagtttctggctgggcgtagtgggccatgcctgtaatcccagcacactggtaggctgagtccgcagatcacttgagcccaggagttcgagatcagcctgggcaagatggtgaaaccctgtctctactataaaaaaaaaaaaaaaaaagttgctgggcgtggtggtgtatgccagtaatcacagttacttgggaggctgaggcatgagaatcacttgaacctgggaggcataggttgcagtgagttgagattgcaccactgcactccagccggggtgacagagcaagaccctgtctcagaaacagcagcaacaacaacaagaacaatccccaaaacaagttcttgtttcattgatgttttatatgtgtctctctctaattatctaatctaattgaatctctctctccccccccatatctccatatctccatctcttgctttctctttctctctctctggtttctattttgcttatttctgctctggtctttatttcttacactaattttgagtttggtttgttcttgcctttcaggttccttgagatgcattgctaggttgtttatttaaaatctgtcttcttttttgatataagtatttattgctgtaaacccccctctttgtactgcttttgctgtttcccagaggttttggtatgttgtgtttttttttcttcttttcttctttttttttttttttttttgagacggagtcttgctctgtcacccaggctggagtgcagtggcatgatctcggctcactgcaagctctgcctcccgggttcactcccacctcagcctccctagtagctgggactacaggcacccaccagcacgcctggctaattttttatatttttagtagagacagggtttcaccgtgttagccaggatggtcttgatctccagacctcgtgatctgcccgcctcggcccccgaagtgctgggattacaggtgtgagccaatgcgcccggccttttcttttctttttttgaaaatgaagacggggttttgccatgttgcccaggctggtgtcgaactcctgagctcaagccatctgcgtgcctcagtctcccaaagtgctgggatttcaggcatgagccaccacaccttgtcattatgttgtgtttctatttcggttttttttccaacaaatcttttgaattccttttaaatttctccatagacccagtggtttttcaggtgtttagtttccaaagttcttgtttttgatgtctagttttatcccactgtggtctgggaagatacttgatatgattttagttttacaaaatttgttgagacttgtttcgtggcctaacatatggtttatcctagagaatgttccatgtgctgatgaggagaatgtatattctgtagctgttgcatggaatgttctatgaatgcctgttagttccatttggtccatagttccactgaagaccagtgtttctttgttgattttctgtctagatgatctgttcagtggtgaaagtggggtggtgaagtccgcaattattcttatattgggatctatgtctctagctctaataatatttgctttatagctgggtgctttggtgttaggtgcatatgtgtttatagttgttacgtccttttgctgaattgatccctttatcattatataatgtccctttttatgttttttgacttgaaagtctattttgtttgatataaatatagctactccttcatgcgtctggtttccatttatgtggagtatctttttccattccttcattttctttttttttgagacggagtttcacccttgttgcccaggctggagtgactgtagtagcatgatcttggctcactgcaatctctgcctcccgggttcaagcagttctcctgccttagcctcccaagtagctggggattacaagcatgtgccaccacgcctggctgattttttgcatgtatgtatgtatgtatttatttatttagtttttgagatggaatattgctctgtcgcccaggctgtagtgtggtggcatgatcttgcttcactgcatcctccacctcctgggttccagtgatgcccctgcctcagcctcctgggtatctgggattacaggcatgtgccaccacgcctggctaatttttgtatttttagtagagacggggttttcaccattttggctaggctggtctcgaactgctgacttcaggtgatctacctgccttggcctcccaaagtgctgggattacaggtgtgagccaccgcacctggcttattccttcattttctatgtgtgtttttacatgtgaagtgagtttcttgtagacagcatatagttgagtctttttttaaaaaaaaatccactcattcagcctatatcttttaattggggaatttaaaccatgtacattcaagattgttcttgatatgtgaaggcttactcctgtcattttgttgttttctgattgctttgtatatcctatgttccttttttcctctcattgtttatccttgctgtttggtggtattctgtagtgataacatttgactagtttctctttctcatttgtatatttgctttgccagtgaattttatacttttatgtgttttcgtgatgatacatattattctttcccttccagatgtaagactctcttcagcattttgtatggctggtttagtggtgaattttttcagttttcatttgtctgtgaaagactttatttctccttcatttctgaaagatagctttgctgggtatagtattcttggctaacaatttttttgctccccacccccttcattcagcagtttgaatatatcatttcattctctcctgacttgtaaagtttctgctgagaaatctgccattagtctgatggagattcccatacatgtgacttgaggattttctcttgctgtttaaaaaactttttttttttttttgagagacattattctgtttcccaggctggattgcagtggctagtcacaggcacaatcatgtctcacgacagccctccaactcttggcctcaagcaatcctacccactcagcctcctgagtattctcttgctgttttcagaatattcttttttattactgtgattattattatttttagagatagggtcttgctccattgcccaggctggtgtgtgatggttcagtcatagctcactgcagccttgaactcctgtgttcaagtgatcttgcctcagcttcttgaatagctaggactacagctaaaagattggccatccctggctactttttacattttttgtatagatagggtcttgctatgttgcccaggcttgtgtcaaactcctggcctcaaagaatcctcccgcctggcctcccaaagcattgggattgcaggagttagccaccgtgttcagtgtagaattctgtttttatcatttacttttgacaacttggcaataatgtaccttagagaggactttctttgggctgaatatgttttgggatctgtgaataccaaagattcgagggatatatgcctgtatctctgctgagacttcggaagttttccgctattatttcattaaacaggttgtctatgccatttaccatctcttctgaaattcccaaagtgcaagtagttgttcacttaatggtgtcccatatgccatgtgggctttattcttttttatcctctcttctttttcttctgagttttttctttttttttctttttctttttttgaggcagagtctcgctctgttgcccaggctggagtgcagtggcacgatcttggcttactgcaacctccgcctcctgggttcaagtgattctgctgcctcagcctcctgagtagctgggattacaggtgtgcaccatcacacccaactaatttttgtatttttagtagagggagggtttcaccatgatggccaggctggtctcaaactcctgacctcaggtaatctgctcacctcggcctcccaaagtgctgggattacaggtgtgagccaccgcgcccagccctgtctgagattttgcaaaagacctgtcttcaagttcagaaaatccgcttgatgtagtctattctattttttatttcactcattgaattctttaatttcacaatttgtttgtttgtttgatatatatctccttgttgaatttttcactgatgaattgttttcctatttctttgtaccgtttgtgtgtgtgtgtgtgtgtgtgtgtgtgtgtgtgtgtgtgtttgtatattgctgagtttccttaagatcattatttttcatttttttcaggcatttcagagatttctttttttggggcggggggggacggatttcttcctagagaattaattgagtttcttttgaggtgttgtatttcccttgcttttttatgtttcttgtgtctactttggcatctgtgcatctggtgcagcagctgctccttccaattttatggagcagcttttgtgcagaaatactttttcctgcaggtatatctacagtattggctggataacgtgctttggccgtacaatagagtagtattcagccatgaaaaggaatgaagttctgatacatgctgcagtgtggatatacctccaaaactttatcctgactgaaaggagccagatacaaaagatcacttattgtatggttccgtgtatatgtaatatattttgtagataaatctacagatgtagaatgctaattggtggttgccagaggctgggaagaatgaggaatgggaagaaactgctgggtaaggagttttaactttggagtgatggaaatattatggaactaggtagaggcagtcattgcggaacactgtgaacgtactaaatgttactgaattgttcactttaaaatggttaattttatgttatatgaactacacctcaatacattattttttaaaagttttatgaacagtcataaattaaaacaaatattcgctatggcgattaatataattgccctgtgttgaggatttaccgggagctggagccttcacatatattgattctaagccttatgtcagcattgcaagatagattaggaagaacaaagaactatattagtagtttaaaataatggctttaaactgctttacaccttgtttatcaaatcaagtgagcccttgaaatttaatcagggactggacggtagggggcacccatggtacttatgttgctctggctatgttgagagcgtcttaagtcataaacacagatttgttgaatgagtttgatactttgaaaattatcacctagaggctgggtgcggtggctcacgcctgtaatcccagcactttgggagactgaggcaggtggatcacgtgaggtcaggagtttgagaccagcctggccaacatggtgaaacctcatctctactaaaaatagaaaaattatccgggtgtggtggtaggtgcctgtaatcccaactattcaggaggctgaggcaggagaattgcttgacgctgggaggtggaagttgcagtgagctgagattgcgccattgtagtccagcctgggcaacagagcgagactctgtctcaaaaaaaaaaaaaaaaaattagcaagaaggatcttattacgaacttatgtttatttgagtttggtattttatctttcagttttaagttttgtagttgaaaatatggaactataggcatgtgccaccacacccagctagtttttgtattttttatagagacggggttttgccatgttgcgcagactggtctcgaactcttgggctcaagcaatctgcctgcctccacctcccaaagtgttggaattacaggtgtgagcctctgtgcccggccaaaacataagttttatgatataatacttgctctatggacgatgttagatgttttaagttttattttcttttaatgaaaaaagattggcaaccactaaattgtttttacaactcattttttaacaagccagtttgaaaagtttttagtgtaaaatgccagtgtttctgctatccgatgaaaagcatcaggttctataaaattttactattggaaagttagggtttggggaagagtattctaaatatatgtaactttgtaatcataacacaaacagaagtaatgttaataaatggtacctcaggagattacttggatagcactaggatgccaggtgatagtagccagagaatgcttcaacatatattcaaaactcaccgaagtaatttagtagaaatgcttgcttacagtgctgagaaattgctgatggaagtggatctctgagcgcaggaaaaagtgcagcctgtcttgagcagagggccatgagtgctcaggggtgtgcccctgtaggaagggagccctggatacaggtgctctgttttagttttctcaaaatagagctgaaaggatcactatttattcagcagccaagcagagggcattttcctttcctgctgaaggctgcaattctgcctgtctttgtagttctcttgcctaggaaaaggtacatatgaatcagcacagctttgttataatgatagttctctatttatcatgatcatgtatgagctaatttatattgtaaaaaatatatttagaacaaaactgtgtgtgtgtccagtgtagtttgccaattttactgtatttcattttagccactgctttttttttttttttttttccttctgagacagagtcgctctgtcgcccaggctggagtgcagtggcgcgatctcagctcactgcagcatccacctcccgagttcaagtgattctcctgcctcagcctcccaagtagctgggactataggcgcccaccaccaagcccagctaatttttgtatttttagtagagatgggttttctccatcttggccaggctggtctcgaactcctgactttgtgatctgcccacctcggcctcccaaagtactgggattacaggcgtgagccaccgcgcccggcgatgctgagatcttaattaagactctaagttttggagagagatgttcaagtttttcatctttacctgagaatccctacaaaatgccaaatactgtaattgtacactaaggtgccaaaattttgatctcaaagatccgtatgaaattatcttggagataaggaacctgaaggcttaaaagacacaagaatcaagtttctcttctggccctttcttatttattacatacaaaaataattacttttccctttaggaattaaaaaaaaaagtagtcactcagggatacctgattctttactgatgcttagcatttttttgtgaataatttttatccctctaacagtaaaatgatgttaaaagcccttgaaaaaatgaaaattaattgcatttcatacccttgaagctctgattttattgataattttgttttttaagtgaacaaaacctcaaaatatactagcaaggtaaatttattgatttctcctcttatgcccgattgcttatcaatttggttcttttgtctaagaatgatccaattagcagactaattttttttcaacagggaactttcgccttcttacactgtgttctcattggagcattgcatagtctctgcatacgtagagcgtgaagatggtgtctttatgtataccttcttaagtaagctaaactgtcttgaaaatggcagtaagtggcacattaagacacaaaaggttatttcttttttggcgaatggttgtttgtttaaatggagaaacataaggtcttatattgagaggtagatttatttaatattccatagatgtaattttaaaaatatttctcctgtctcagaatgaagtgagggttctgctaagacagctttgtaattcacagctttctttgaaaatgctgtacctctattccttattgatggacttgaatgcacaatcatttgtggggtttttttgttttgtttttatgaaatagcagtttgatcatttataccaaaagttagtgctatatgattagatatcaaggttccttagatagaagcattccaggctggatatctgactccttttatcatctgcatggtgtacttagctgtatataaaatggaaaagtagcaagtttaaatgactggtaaagttggaggcacactctgctacccagcggttctatttctgtgtcttcttgagagaaacttttacccatgtgctcaaggatctatatagatggaggtgtaatttattataatggtgatctagataggatctagatagatggaggtgtatttattataatagtgaataagtacaaaaatacttaactgttcctcagtaagtgaatggatacattgatattattcgtatagtggaattcaagtaaacaatccttatctccagaatacttagggcagatgtattttggaatttagaaatttttaaactttaaaggtaattcggtatgtataccatttattgtataacactcccattgggatttgggaaacacctcataatcaaacatactaatttttctgtagcaaaatttatgaatattcatattaagtgggataaatagattttaaatggcttcatactatttgggttaattacattttttaattaggttatgggaaaacttaagagctttttggattttagatttttggaaaaagaattgtgaacccatattataaagttcataaaatgaatgaaatcgagctacatgtatcgatgtggataaatctgaagcatattatgttaagtaacaaaaggaagttgcagagataaccttgtgcaaatgacatcatttatgtgaattgttaaataagcaacagtgagagagagagagagagctctgaagcaaataaggcaaattattggtagtggttttcttactttgttgtatgtttgaatgtgtctttataacctcaaacttcagcttttaaaccttctgttttaccttaagaatgtaaggttacattgagttaggcaataagagtatgctacaaagcatgtcagaactggaagtgttctttaaaatcatttaaattatcatcccttctttttttcttactttctttttttcttttcttttttttttggaggcagggtctcactctgccgcccaggctggagtatagtggcatgatcatggttcactgcagcctcagactcctgggctcagggaaacctcctgagtatctgggactatagatgcatgccactgtgcccagctaatttttttaatttttttgtagagacagtgtctgtgttgcccaggctggtcttgaactcctgggctcaagcagtccttcctcctcggcttctcaaagtgctgggattataggtgtgagccactgtgcctggtctactcttccttcttctaatccaagtcattcctacttgttaagagattctcttgaatatttatttattttccctttttaaaccttagaccttttacttcttttcaaaacatattttggttgagatatagtttccatacagtgaaatgcacacaccttaagtatcttgtttccatgagttttgacaaatgccaacacccgtgtaatccacaattctgtcaagatacagaacatttccatcatcccacaaagttcccttgcatctctccccagttcgcatcatccctgccccgcagcacaggtagtgttctgattcctttcactttaattttacgtgttctcgaacttcatttaaatggaatcatacagtctgtaccctgttgtgtctggcttttgttgctcagtgtgttgttttttacatttatccatgttgttgcatgtatccatagttatccttttatatactgagtaacactccattgtgtgaatgtggtactatcagtttatccaatcttctgttgatggacatttgtgttgtttccagtttttggctcttatagataaaaccactgtaaacatttttatatggttgtgtttattggtacatgttttcatttctcttggggtgatacctaagggtggaattcctgggtcctagggtggtgcatacttcacttcgtgagaaactaccagagcagttttcagtgttgcttctggctgcttccatccttgccagcatttggtattgttaattgtctaaattttagccattctagtgggtgtgtagtgatatcttattgtggttttgatttgcatttccccagttactaaagatactagtcactttttcgtttgcttattggttagttagttcaattgcttattgtccttagaagaacgttcatcttccccaggaatgtatttttctttttgaagtatctaagtcttctacccacttttaaaaagttttttttttttaattgagttgtagaagtagtttatatattctggatacaagtcctttaacagttatatgtggcatgccaattttatttttatagtggtctctttctttttaaaatttttcctcatcactctttccatatgatacaatgttctcttttgataagcagaaattaaaaattttgaagtctaatttgtgaatttaaagttttatcattagtacttcctaagataaccatccaaatatctttcccttaaaagtataaagtctgaggctgggcacagtggctcacacctttaatcccagcactttgggaggccgaggctggcagatcacctgaggtcaggagtttgagaccagcctggccaacatggagaaaccctgtctctactaaaaatacaaaaactagctaggcttggtggcgggcacctgtaatctcggctacttgggaggctgaggtatgagaatcgcttgaacctgggaggtggaggttgcaatgagccaagattgcgccactacactccagcctgggcagcagagcaagactctgtctcaaaaaaaaaaacaaaaaagtgtaaagtcagctgaagtgatatgaaagcttttgtgatcatagacctaagcatttgaattgcaaatataacttggtgtgtgaaagctctgcagtatgcatgcaggaattaaatgtctgtctggaaataatgccaacaaatatatttattggggtttgtgtgatagaattggcagataaccaaggaagcaaatttattttccttttaaatatgaaggaaaatttatgaaggaagagcaaatttattttcctttcaaatacgaaaacatgaagtaatcttttgtaatgtttactacctacattgattgcctttctctgcattaatttctcaaaaattttcttcattaattttcttgaggagctcttttatctgcttaatgtctttacaaacacatgtgcaaaagagtctcagacgcatcttatttgatgattgtcatggaaaatattaagggtttgtgtacaaatgtttatactgcagtgttttgcttcaagaaaaatgtatggtcttctctatgcaagttttatcatttttgttgttgtttttatttccaagtcctttctgtgttttaattttaatttttacttttatttttgagacagagtctcgcactgtcaccctggctggagtgcagtggtgcgatctcggctcactgcaagctctgcttcctgggttcaagcagttctcgtgcctcagcttccctagtagctgggattacaggcatgcaccaccatgcccagctaatttttgtatttttagtagagatggggttttaccatgttggctatgctggtctctaactcctgacctcacatgatctgcgtgccttgccctccctaagtgctgggattacaggcgtgagccactgtgtccagccaataaatactttaaaaataaattttcaggccaggtgcggtggctcatgcctgtaatcccagcactttgggaggctgaagcgggtagatcatgaggtcaagagatcgagaccatcctggccaatatggtgaaacctcgtctctactaaaaatacaaaaattagctaggcatggtggctgtgcacttgtagtcccagctacttgggaggctgaggcaggagaatggcttgaacccagaagacggaggttgcagtgagctgagatcacgccactgcactccagcctagcgacagagcaagactccttctcaaaaaaaaatttaaaaaaatgtttttttcagcaatgtgtggaaaatatacacaagatataagaccaataaaatgctactgtctaggagatgaggtgcctcatacctgaatccagcaccaaggtgggcggataacctgaggtcaggagtttgagaccagcctggccagcatggcaaaactccatctctactaaaaatacaaaaattagggggtggtggcgtacacctgtaatcccagccacttgggaggctgaggcacgagaatggcttgaactctgaaggcggaggttgcagtgagccgagatcacaccactgcattccagcctgggcgacagagcgagactctgtctcaaaacagaagggacttggaaataaaaacagctaacaacaaaaacccgtaacatagtcatttattatcattatcaagtattatgtactgtatataattgtatgtaccacacttttatatgactgtcaacgcattaggtttatttacactaacatcattgcaaacacatgggtaaggcatgtgttacaacattatgatggctatgaccaatgtgataggaattccccaccctcccacccgagacggagtcttgctgtgtcgctaggctggagtgcagtggcatgatctccactcactgcaacctccgcctcccggataagcgattctcctgccttagcctcctgagtagctgggattacaggcacgcaccactacacccagctaatttttgcatttttagtagagacggctttcaccatgatggccaggatggtcttgatctcttgacctcgtgatctgcccgcctctgccttccaaagtgctgggattacaggtgtgagccaccatgcctggcctgtgataggaattttttagctccattgtaatgttatgggaccaccatgatacatgcagtctcttgttgactgaaacgtcatgtggtgtatatagaatgcatttatgacagtaggacttacccattttgatagtgttttcatttattcctttttcttttttttccgagacagagctttgctctgtcacccaggctggagtgcagtggcgtgatcttggcatcctccaactcctgggtgcaagcgattttcctgcctcagcctcccgaatagctgggattataggatgccaccatgtccagctaaggttcgtagttttagagatggggtttcaccatgttggtcaaactggtctcaaactcccccaccccaagtgatctacccactttggcctcccagagtgctgggattacaggcatgagccactgcacccgaccacattttcatttattctttaacttctattctgggttgtggtagcataaagatggattatgtttattgctgaaataaacctgttgtccaaattttgatgttttccagccattatcttgctacttagatttatgtacagcattcgcagagcaaaaagatagatgatcttatttttcctggattcagaggcagagagtagttgttagaattctagtgtaattgctcattcattttcttgactctgacatctttttttagaggaaaataactttggttagtaagctccaaataatgggtgagaatgttaaacaatttaatccatccctttgagttctagtgcgggtcttttttgcattttggtgagtctcctgcttgtgtttagattagtctgaaaactttgatttggtttaatatttgagggctttcagtgtgctttgctgtacaggaaataaatctctgtcattaactcaaagaatactaaactaacaataaggaggagtaaattaccttggaggctcttcccctgtctcattctctgtggttcagactcattaaattagtttcttcttttaaaatgtttcttcttttaaaattatggaaattagaattcagttgacgtttgtacaaagtggggttatatctgtgtataagttttgacaccccccaaatttaactattaatagcctactgttgaccaggggcctgataacatagttgattaacacatattttgtatgttatatgttaacatgtattttatgtatatactgcattctttaaagcaagctagagaaaagaaaatgttattaagaaaattgtctgggtgtggtgcctcatgcctgtaatcccagctctttgggaggccgaggctggtggatcacacggttaagagatcaagaccatcccggccaatatggtgaaaccccgtctctactaaaaatacaaacattagccaggcgtggtggtgctcacctgtaatccctgctactctggaggcagaggcaggagaatcgtttgaacctgggaggcggaggttgcagtgagctgagattgtgccattgcactccagcctgggcaacaaaagtgcactccattgcactccatctcttggaaacagagcaagactgtctcgggggaaaagaaaaaaaaagaaaatcacaaggaagagaaaatacacttactattcattaagtagaagtggaccatcacgaagatcttcatcctcatcatttttgttttgagtaggctgaggaagaggaagaagaaaagggattggtattgctgtctcagatttggcagaggcagaagaaaatccatgtgtcagcagaccctcaaagttcaaacctgtgtggtacaagggtcaactgtactttgttttcatagagatatattaaagttttatgagtttagctcatagtgatcttataggttctaagcttcatttgaatatattgcatgtaaaataaatgctttatctgtgttccttttgtctttcttgaatattgttgttaatttaaaatttgtaataggttataactcttatgttttacccatttgtgagctttatttttggataagaactttatcctgtacttttgctgtgcttcgtatagtacaactatgaaagattcttgttgactgttgattatctgaaaatgcttctttttgcttcaggtcaaatattgaataaacctagagcatataattaacatttttattaggactgtggtttgtattttggccagttgggatttaagaattacttgtattggttggtgtagaactgattttttttttctttttcttttttttttttttggagatggagtctcactctgtcgcccaggctggagtgcagtggcaggatctcagctcactgcaacctctgcctccccggttctagcaattctcctgcctcagccccctgagtagctgggtttacaggcgcgcaccaccatgcctggctaattcctgtatttttggtagaaacggggtttcaccatggtggtcaggctgatcttgaactcctgaccttgtgatccgcctgccttggcttcccaaagtgctgggattataggcatgagtgatttttttagaataagagtaattggctgcattatttttttaaggaagaggtataacttcccagatacttgcaatgcggctaatatacagtagccatttactttcaacataatttctcaacatttaatttttgtcagtttttcataaaaaatttatgacagggtaaaaagatgacattcctaagtcctagaaagtttattgatgataaatacaaagaattaaattgcagatcagtcttagaagtgctattctgtggataagcatacagccctgggcagcacagacgggaacatcagatagcccaaccaaaccggaagcttgacttggttgacttaagaattctttaaaactcttttgcgtgttacattaataaagtttatttaatacatgtatttatatgtttcagaaaaaaatgttcttaatttaacatttgtaaaagggtacaatactggtgttttctctgactctgatcttcttgataaacagtgtactgagttctctgtgatatattttgtttgtaatcatgaccatttcacgtgtccataattttttttctctaaaaatatctctagactacatagttctgttattttaggaatgagaataaacgggatcaaagtgtactcttgttctaagaaactaatgacagtttatttgttggaagttctgcctcagaagagcttctgatatttatctaaaatatatgaatagtagttgtgatctgtcattgtttttgcagatatctaattgttgtaataaaagtcataggccctgtcagatagttaagaattttcattattgttgttcacaatatcctaccatttcattgagatatagcttggtgtaataatagtacagtccctggagtaaattttagacaaatactttcccagcctttcaaaatcaagctgagtgttagagtgagaagtagactagtgagtgttgctataaaatttggagtgtgagatcattttgcagtgtgtcgggaacagacttcccaaatagacattctagtattatcttacaactcgatctttccttaaactcaatgtatctgtttttggttgatcattatagatgtctgtgatgtgtgaatatgcccattttatcttctgtatgaatatgctggagaaagagtagccttgcttgtagtctgcttttttccttcttctaaaggagttggcaggaatttttataaaataaagctagcctgattgtagccaaaagaggaaatgttggtttatattttagtggagaaaactgctgtatagacttctaggctaccaagtcagagcattgttttatttttatactatagtaaaatgggtgcaggcggagctgaagaaccagacacactagtagttaatgttttctttctttaccaaaatagtaattgccatgctacatttagccatatgtgccaaagcgtatgtgaaactgttaactgtagccaacatatatttctcctgacttgaatgaattgatgacgaatggtcagaaaaggaggaacagtcatacctagaaatcagcttccctgttgaatttcacttctggtatttccctttgggatatattcactcaggagtgtcaggattttttttgacttccaagggaaagaaactaggcttcagagaattagcattttgatacatctttttattgaaggtcttttgaactccagcaactgttaatctttaaaagatgatgctggtagtgaaatgcattttaaaatttatattcatgaatttaaattcctgatttttttttttttggtgagtttattcttcgaaagaaatagcagtgcttttcaagtgtttgaagactaccagaattgaaagctcactgcttgctaaaagcataatacccaaaccggaaatgataaaggaaaatgtcattgtctttgtattaaaaaagaaaatatctattaaaagtcatcataaacaatgttaaaagaaaaatggcagacttggaaaaatatttgtaacatacacagcaggtgaaaggttattttcctaatatgaagagctcttaaaatggattaagaaaaaatgttcaataacaaaatgggcaaagaacaaggagagaggagtcacaaaagttgatatacaaagacacagatagaaatgatttgtaatatgacaaaagtcgatatacaaagatacatatagaaatgatttgtaatatgacaaaagtcgatatacaaagatacagatagaaatgatttgtaatatgataaaagtcgatatacaaagatacagatagaaatgatttgtaatatgacaaaagtcaatatacaaagatacagatagaaatgatttgtaatatgacaagtcgatatacagagatacagatagaaatgatttgtaatatgacaaaagtcgatatacagagatacatatagaaatgatttgtaatatgacaaaagtcgatatacagagatacatatagaaatgatttgtaatatgacaagtcgatatacagagatacagatagaaatgatttgtaatatgacaaaagtcgatatacagagatacagatagaaatgatttgtaataagacaaaagtcgatatacagagatacagatagaaatgatttgtaatacgacaagtcgatatacagagatacagatagaaatgatttgtaatatgacaaaagtcgatatacagagatacagatagaaatgatttgtaatatgacaaaagtcgatatacagagatacagatagaaatgatttgtaatatgacaaaagtcgatatacagagatacagatagaaatgatttgtaatatgacaaaagtcgatatacagagatacagatagaaatgatttgtaatatgacaaaagtcgatatacagagatacagatagaaatgatttgtaatatgacaaaagtcgatatacagagatacagatagaaatgatttgtaatatgacaaaagtcgatatacagagatacagatagaaatgatttgtaatatgacaaaagtcgatatacagagatacagatagaaatgatttgtaatatgacaaaagtcgatatacagagatatagacagaaatgatttgtaatatgacaaaagtcgatatacagagatacagatagaaatgatttgtaatatgacaaaagtcgatatacagagatacagatagaaatgatttgtaatatgacaaaagtcgatatacagagatacagatagaaatgatttgtaatatgacaaaagttgatatacaaagatacatatagaaatgatttgtaatatgtatcagaattacaattgtacatactttgtgatccagcaattccatctttgagagttcccaagaaaaatgtggattcatgtgtaaagatacatatgtgaaggtgcatcttacaatagtgaaaaatgagaactaacctaaaatatccgtaagtggaattttatgaccaacatcttctctccaaccaatttttttattatggtaaaatatatataacataaaatttaccatcttaaccatttcgaagtgtacagtttagtggcattcagtatatcccatctatctccagaactcttttcatcttgacagactgaaactgtatacccattaaacaataactcctcgttctgtcccactcctatgtcctggcaaccactgttctagttccttctttatcaattcgactgctctagatacctcatgtcaatggatacatatagtgtttgtctttttgtgattggcttatttcacttagcacaacgtcttgaaggttcatctgtgttgtagcatgtgtaagaatttctttcctttttaaggctgaaaatcattagcaggtgatatggtttggctgtgtctccattcaaatctcaactggaattgtatctctcagaattcccacatgttgtgggagggccataggaggaggtaattgaatcatgggggccagtctttcccatgctattctcgtgatagtgagtaagtctcacgagatctgatgggtttatcagggggttccgcttttgcttcttcctgattttctcttgctgccgccatgtaagaagtgccttttgcctcataccgtgattctgaggcttcctcagccatgtggaactgtaagtccaattaaacaagtgccttttgcctcataccgtgattctgaggcttccttagccacgtggatctgtaagtccaattaaacctctttttgtttccagttttgggtatgtctttatcagcagcgtgaaaacgaactaatagagcagccaccttatttccaaaaaaaaaaaaagattttttcaatggataatgcaggtatttatacccttatttaaagtatgagggatctgaaacccagaaagatggtgacatgtctaaatgtcataactagtcagcgtgagagtcagaactgaaactcatgttttctcatcacagtttcgtgttcttcccagtatggtacactgcttaggccttgaatacaaggaatgatcttttattgttgcttcttcattcctaaaaataagatttttgatgtcacagccttttggaattcattgtataatgtgctggaatttacataaccattcagattaaaggttcgtgtaccttctttagggatagaagctaaagatctaccctctcaaacattttagtagttcatctgcattaacacctttatttaattagccacccatgttgttaccgtcccctgtataaaaagctttgcatattctaacttaaaaaaactttgctatattattatctttgggtattaccagttttgatttctgcaatctgctctgtttttgctactagaggaggaaagctgatttggagttttctttttttcttggttctagttttagtgggctgcaaggattgctttgaatgccagctctatcacttactctgtgatcttggacaagtgcttaaacctctctaagcctcgtgccctcatttataaaattaaataatagtacatgtgttgggtatctaaaatagtcaaattcacagaatcaaagtgtgtaatggtagttgccgggggtagggggaaatggagagttactaatcaacaggaatataaacttttggttgagatgaataaactctacagatttgatgtataacattgtacctgtagtcagcagtaatgcattgtacacttaaaagttgttaggaaagtagatgtcatgttaagggtttttactacagtaaaataaaaaaagagtccatgtgtcataatgaagattaaataacataaaaaatgtgtggtacaatctggcatatacaaactacttgttaaatgttaatatttattatttaatgtttataatacttaaaagtcattttgtatttcgctgtccttcggttttgcttgtttgtttgtttgttttgacacggagccttgctctgtcacccaggctggagtgcagtggtgtgatcttggcttactgcaaactccacctcccagttcaagcaattcttctgcctcagcctcctgagtagctgggattacaggttcgtgccaccatgcctggctaatttttctatttttagtggagacggggttttaccacgttggccaggctggtcttgaactcctgacctcgtgatgtgcccgactcggcctcccaaagtgctaggattacaggcgtgaaccaccgtgcctggccaatttttgtatttttagtagagatggggttttatcatgttggccaggctggtcttgaactcctggtgatccgcctgcctcggcctcccaaagtgctgggattataggtgtgagcccccgcgcctggccatcctttgtattttttgatgaaaaaaaaaaattttttttttttttttttttttaagacagagtttcactcttgttgcccaggctggagtgcaatgagtgcagtcttggctcactgcaattcccacctctcaagttcaagcgattctcctgtctcagcctcccgagtagctcagattacaggcacacgccaccacgcccggctaacttttgtattttagtagagacagggtttcatcatattggtcagactggtcttgaactcctgacctcagctgatttgcccaccttggcctcccaaagtgctggaattacacaggtgtgagccaccacgcccggctgttttgatgaaattttttgaaagaatgtattcatattcctgtagatttcccatttcccacattccctcaaatttagtttccgtgttaatatcttctattaattttgaacagtgtctttattgtagtttatgcaaagtgaggagtgagtgccatacttattttgcttcctgttgagaataaactgaagttaaattactgacattttgcatattatctcaatcattttttaaggacctgtaaaacagaataaggtgaatcctaatttgctagatgcagatttcttgtagctatttttgattcctgcaggctgctctgatttgctacttgaggaggaaagctgatttgggggttttctttttgtcttggttctagcacatgcagatgacaatccaggctctccaggatgaattgcggatccagagggacctgaatcagctgtttcagcaggatagtagcagcaggactggcgaaccttgtgtagcagagctgacagaggagaactttcagaggcttcatgctgagcatgagcggcaggccaaagagctgtttcttcttcgaaagacattggaggaaatggagctgcgtattgagactcaaaagcagaccctaaatgctcgggatgaatccattaagaagcttctggaaatgttgcagagcaaaggactttctgccaaggctaccgaggaagaccatgagagaacaagacgactggcagaggcagagatgcacgttcatcacctagaaagccttttggagcagaaggaaaaagagaacagtatgttgagagaggtatgtgactacttttttagttttatgatttgttggttatcttttttttcactgattaatcagcatcttggccccagtgaatctacgtgctctgccgtgctggtggaagagaatttcatcctttgtatttaagtgcgtcactgatttctgttctgatttgccctgttgtatgggatgacattgtctggtatgtatgctggctcagtgactttctgggtcttttctctcctgctcccctgattttgagagttcatttgttgctaaaggggtaaaaaattccttgatttttcactcatctctagatctgttcatagagacaacaaacacaacaaaaccagaatcagaatagctaaccattgcttaatttaaaaatattagtaaaagagagtaagcggttatctcagcttatgtgtgcttataaaagtccttggcagcaataatggatatttgccctgtggtttccatggaaactgttgccttgctgtaaaagatacgtgataaaaatcattggctgccatggaggcatagctggagagagtgatgtagagacacagtgttacttatttttagctgacctaggtgactactgataattttttacttttctaaataatgtatcattttaagaaggcgtaaaggaagaaaccatcttatattgaattaaaaaattaatagccataataacttttctatatatagttggacttcaggtaattttcacttttgggcaggggaaaataaatccctaatctgtgttagtatgagtctgaataattcctttttaaataaaatgtgaggaaggaggtttaaaaaatggcgtattcccaaagcagcaaaataataatttttaaaaatacttctaaatttgtaggttgttctataatttttccttttgtaaaaagtctgaaatcttttttaacagtgagggcatttttatttttgaagtagaacatcattgttttttaaaaacatgatgttattacactggaaatccattgtagtaaaattgggaaatagattaacaaaaacttataactcaaagtattgttacctagtagtaattattaacttatgtatatgcttccagtcattttttttttattttaaatttttattgtttttatttttagagatagggtctcactctgtcactcaggctggagtgcagtggcatgatcatggctcactgcagccttgaaatcctgggcttaggtgagccttctgccttagcctccctagtaggtaggtctacaggtgcatgccaccatgcattgttaatttttaaattaaaaaaaaaattttgtagagacagagtctccctatgttgcctaggctggtcttgaactcctggcctcaagcaatcctccctccttggcttctgaaagtgctgacattacaggcaatatgcctatgcctggcccattattattattgttgttgttgttgttgaaagtgctgagattacaggcaatatgcctatgcctggcccattattattattattgttgttgttgttgaaagtgctgagattacaggcaatatgcctatgcctggcccattattattattattgttgttgttgttgaaagtgctgagattacaggcaatatgcctatgcctggcccattattattattattgttgttgttgaaagtgctgcgattacaggcaatatgcctatgcctggcccgttattattattattgttgttgttgttgaaagtgctgagattacaggcaatatgcctatgcctggcccattattattattattgttgttgttgttgaaagtgctgagattacaggcaatatgcctatgcctggcccattattattattattgttgttgttgaaagtgctgagattacaggcaatatgcctatgcctggcccattattattattattattgttgttgttgttgaaagtgctgagattacaggcaatatgcctatgcctggcccgttattattattattgttgttgttgttgaaagtgctgagattacaggcaatatgcctatgcctggcccattattattattattgttgttgttgttgaaagtgctgagattacaggcaatatgcctatgcctggcccattattattattgttgtttgttgttgttgaaagtgctgagattacaggcaatatgcctatgcctggcccattattattattattgttgttgttgttgaaagtgctgagattacaggcaatatgcctatgcctggcccattattattattattgttgttgttgttgaaagtgctgagattacaggcaatatgcctatgcctggcccattattattattattgttgttgttgaaagtgctgagattacaggcaatatgcctatgcctggcccattattattattattgttgttgttgaaagtgctgagattacaggcaatatgcctatgcctggcccattattattattattgttgttgttgaaagtgctgagattacaggcaatatgcctatgcctggcccattattattattattgttgttgttgaaagtgctgagattacaggcaatatgcctatgcctggcccattattattattattgttgttgttgaaagtgctgagattacaggcaatatgcctatgcctggcccattattattattattgttgttgttgaaagtgctgagattacaggcaatatgcctatgcctggcccgttattattattattgttgttgttgaaagtgctgagattacaggcaatatgcctatgcctggcccgttattattattattgttgttgttgaaagtgctgagattacaggcaatatgcctatgcctggcccgttattattattattgttgttgttgaaagtgctgagattacaggcaatatgcctatgcctggcccattattattattattgttgttgttgaaagtgctgagattacaggcaatatgcctatgcctggcccgttattattattattgttgttgttgaaagtgctgagattacaggcaatatgcctatgcctggcccattattattattattgttgttgttgaaagtgctgagattacaggcaatatgcctatgcctggcccattattattattattgttgttgttgaaagtgctgagattacaggcaatatgcctatgcctggcccattattattattattgttgttgttgaaagtgctgagattacaggcaatatgcctatgcctggcccattattattattattgttgttgttgaaagtgctgagattacaggcaatatgcctatgcctggcccattattattattattgttgttgttgaaagtgctgagattacaggcaatatgcctatgcctggcccattattattattattattgttgttgttgaaagtgctgagattacaggcaatatgcctatgcctggcccattattattattattgttgttgttgaaagtgctgagattacaggcaatatgcctatgcctggcccattattattattattgttgttgttgaaagtgctgagattacaggcaatatgcctatgcctggcccattattattattattgttgttgttgaaagtgctgagattacaggcaatatgcctatgcctggcccattattattattattgttgttgttgaaagtgctgagattacaggcaatatgcctatgcctggcccattattattattattgttgttgttgaaagtgctgagattacaggcaatatgcctatgcctggcccgttattattattattgttgttgttgaaagtgctgagattacaggcaatatgcctatgcctggcccgttattattattattgttgttgttgaaagtgctgagattacaggcaatatgcctatgcctggcccattattattattgttgttgttgttgaaagtgctgagattacaggcaatatgcctatgcctggcccgttattattattattgttgttgttgaaagtgctgagattacaggcaatatgcctatgcctggcccattattattattattgttgttgttgaaagtgctgagattacaggcaatatgcctatgcctggcccattattattattattgttgttgttgaaagtgctgagattacaggcaatatgcctatgcctggcccattattattattattgttgttgttgaaagtgctgagattacaggcaatatgcctatgcctggcccattattattattattgttgttgttgttgaaagtgctgagattacaggcaatatgcctatgcctggcccgttattattattattgttgttgttgaaagtgctgagattacaggcaatatgcctatgcctggcccgttattattattattgttgttgttgaaagtgctgagattacaggcaatatgcctatgcctggcccattattattattgttgttgttgttgaaagtgctgagattacaggcaatatgcctatgcctggcccgttattattattgttgttgttgttgaaagtgctgagattacaggcaatatgcctatgcctggcccattattattattattgttgttgttgaaagtgctgagattacaggcaatatgcctatgcctggcccattattattattattgttgttgttgaaagtgctgagattacaggcaatatgcctatgcctggcccattattattattattgttgttgttgaaagtgctgagattacaggcaatatgcctatgcctggcccattattattattattgttgttgttgaaagtgctgagattacaggcaatatgcctatgcctggcccattattattattattgttgttgttgaaagtgctgagattacaggcaatatgcctatgcctggcccattattattattattgttgttgttgaaagtgctgagattacaggcaatatgcctatgcctggcccgttattattattattgttgttgttgaaagtgctgagattacaggcaatatgcctatgcctggcccgttattattattattgttgttgttgaaagtgctgagattacaggcaatatgcctatgcctggcccgttattattattattgttgttgttgaaagtgctgagattacaggcaatatgcctatgcctggcccgttattattattattgttgttgttgaaagtgctgagattacaggcaatatgcctatgcctggcccgttattattattattgttgttgttgaaagtgctgagattacaggcaatatgcctatgcctggcccgttattattattattgttgttgttgaaagtgctgagattacaggcaatatgcctatgcctggcccgttattattattattgttgttgttgaaagtgctgagattacaggcaatatgcctatgcctggcccattattattattattgttgttgttgaaagtgctgagattacaggcaatatgcctatgcctggcccattattattattattgttgttgttgaaagtgctgagattacaggcaatatgcctatgcctggcccattattattattattattgttgttgttgaaagtgctgagattacaggcaatatgcctatgcctggcccattattattattattgttgttgttgaaagtgctgagattacaggcaatatgcctatgcctggcccattattattattattgttgttgttgaaagtgctgagattacaggcaatatgcctatgcctggcccattattattattattgttgttgttgaaagtgctgagattacaggcaatatgcctatgcctggcccattattattattattgttgttgttgaaagtgctgagattacaggcaatatgcctatgcctggcccattattattattattgttgttgttgaaagtgctgagattacaggcaatatgcctatgcctggcccgttattattattattgttgttgttgaaagtgctgagattacaggcaatatgcctatgcctggcccgttattattattattgttgttgttgaaagtgctgagattacaggcaatatgcctatgcctggcccgttattattattattgttgttgttgaaagtgctgagattacaggcaatatgcctatgcctggcccattattattattattgttgttgttgaaagtgctgagattacaggcaatatgcctatgcctggcccattattattattgttgttgttgttgaaagtgctgagattacaggcaatatgcctatgcctggcccgttattattattattgttgttgttgaaagtgctgagattacaggcaatatgcctatgcctggcccattattattattattgttgttgttgaaagtgctgagattacaggcaatatgcctatgcctggcccattattattattattgttgttgttgaaagtgctgagattacaggcaatatgcctatgcctggcccattattattattattgttgttgttgaaagtgctgagattacaggcaatatgcctatgcctggcccattattattattattgttgttgttgaaagtgctgagattacaggcaatatgcctatgcctggcccattattattattattgttgttgttgaaagtgctgagattacaggcaatatgcctatgcctggcccattattattattattgttgttgttgaaagtgctgagattacaggcaatatgcctatgcctggcccgttattattattattgttgttgttgaaagtgctgagattacaggcaatatgcctatgcctggcccgttattattattattgttgttgttgaaagtgctgagattacaggcaatatgcctatgcctggcccattattattattgttgttgttgttgaaagtgctgagattacaggcaatatgcctatgcctggcccgttattattattattgttgttgttgaaagtgctgagattacaggcaatatgcctatgcctggcccattattattattattgttgttgttgaaagtgctgagattacaggcaatatgcctatgcctggcccattattattattattgttgttgttgaaagtgctgagattacaggcaatatgcctatgcctggcccattattattattattgttgttgttgaaagtgctgagattacaggcaatatgcctatgcctggcccattattattattattgttgttgttgaaagtgctgagattacaggcaatatgcctgtgcctggcccattattattattattgttgttgttgaaagtgctgagattacaggcaatatgcctatgcctggcccattattattattattgttgttgttgttgttgttgttattattattattattattattattattattattattattattatcatttgtgacagagctttgctctgtcccaggctggagtgcagtggcgcaatcttggctcattgtaacctccacctcccgggttcaagctattctcctgcctcagcttcctgagtagctgggacaacaggcgtgcacaagctaatttttgtatttttagtagagatggggtttcgccatgttggccaggctggtctcaaactcctgacctcaggtgatctgcctgactcggcctcccagagtgctgggattacaggcgtaagctactgcacccagccccatttttattatttatagattccttcattatttgtttctttttttatcttacaaggatggaatgctgtgcatcagcactgttcagaaagactttctgggtggagtgctaattaagttgggaaggggattttataacagggtaagtgtcctttagtaggtaccctttcagtggagatctgaagagaagaagccagctttgccaagtaaaataatttcatgaagaagcattaacagttttaaagacctcataggaaggagttttgaggaaacaggagggaggctggagggcaagaatatactgtataaggggaagacttaatgagatgcgaaattggagaggtggccagagtcagattcacttatcacgtatttactggacaccaaccatgcgcacagcactaaggatatagcagcaaacaaatccatgctgtctttgagaaaaagtacctgcctttatgatccttgcagataatgcaaccattttattcaaaatgggagagaaaaccattccaccgttgaatcaagggagtgacacaatctgatttgcttttaaaatttactctggttgtgctgagaataaatggaggaaggagagaagagtgaacaagggagtatagtaaggaatttaactgctgtaatctagattaggggaatggggacttgaaatgattgctggagatgtacagaatatcactagcgtatcaggaagcagcacaaagaattatgggctggcaatgctagggtatccagaaatttcattagttattgaattattgtccatcttttaaaaaaaagtggcatttaatcaattctttttttttttttttgagacggagtctcgctctgttgcccaggctggagtgcaatggtgcgatctcggctcactgcaacctgcgccccctgggttcaagcgattctcctgcttcagcctcccgagtagctgggattacaggcacccatcaccaggcccagctaatttttctgtttttagtagagacgaggtttcaccatgttggtcaggctggtcttgaactcctgacctcgtgatccgcccgcctcggcctcctaatatgctgggattataggcgtgagccaccgcgcccggcccacatttaatcaattctaaaagtcacaactttccctgttttaacaatgaaattgagttaagtgttaacacttggtgtcatgttaacagtctatatcagcaaagcagcagtcctggtatatttgtttgcccgtgtattcacaaatataatcatgtccattcattttgtcatcatttcagctgaggtatgagcattgttggcatttcccatgttaactttgttgttcagtgtttctgcataaatattctgtgaatcagcattgaaacaaaattacccggtatggagaaagttatgaaaacagtttatgatggtatgtgattaaactctgtttaaataagtttaaaaaaactaactcttgcaatcagtattaagtaaaaattctagggcgggtgcaatggctcacgtctgtaatcccagcactttgggaggccaaggcgggcggatcgcctgaggccaggagttcgagaccagcctgggcaatatggcaaaaccctgtctctactaaaaatacaaaaattagctgagtgtggtggtgcacgcctgtaatcccagctctttgtgaggctggcacatggtaattgcttcaacccaggaggcggaggttgcagtgagccaggattgcaccactgcactccagcgtgcagagtgacactctgcctcaaaaacaaacaaacaaaaccctaaatttatgataaagttttgtgtcatgatttatttggaggcatttccactatttcttttcagcatgtacaacagtggtgtgtcttataatcagtggcatcttagatttgatgaaataagatagcattaaaatggcatttgtagctattagtagtaacatttgtaattagttttacgttttctttattaacatgattttgtagctggcaggtaaataattctcccccccaaaagccgagaggtaaaaagtaagatttcaatgaagcattgtattttctgtttgtactcaaatcacattgttgtttgaccgcttattcttagcttttgtattatttcgctgtagctcctttcatttgactgttagaagagtggggacatctcttggacaaatgctgaattacaggcaagacttggttagtgctgagggcttgacaggtgattctgttatacaccaacatttgaggccccaactttggttttcagtccgctagcagaggatacctaagttggctgtggaatttttgggtcttcaatccatatgcataccaaacattgtctataggccaactaaataatatatttcagtatgtgctcctacttacttaaatgctggtatgctattgtgattaataaaatacaactttgttttaaaacattattgcagcctactagttttttgtctgtattttaatcaacaaaccgtattagtacaactgctatcgtgttaggtttgcaaaaatctttgaggttaaaagtgctaatatttgaatatgttctaggctagggaattctgaatctaactagcatatctgaggactgcttgtcagtttgtcagtattactggcagatagaaggtataagcagaggagattaaagaaaaaaagaaacatatatatatgtttatgtgtatttatttatatataaatatatatttttctatatataaatgtatatttttctatataaatatatatatttttctatatatatatatatatatatatatatagaaaaacatagaaaatgaataggaatttaaaaagaaattttttttttttttgagacatagtgtggctctgtcgcccaggctggggtgcagtggtgcaatctcagctcaccgcaacctccgcgtcccgggttcaagcaattcttctgcctcggcctcctgagtagctgggactacaggtgcctgccaccatgcctggctaatttttgtatttttaatagagatgaggtttcaccttgttggccaggctggtctcaaactcttgacctcaagtgatcctcccggctcggcctcccaaagtgctgggacaacaggcatgagccaccacacccggccaaaaaagaaaaagaaattcttagtttgtcttttgtagcaattttggaagatgagaacagttgcataccttatttatttaagttattccttctctctcttttttttttttggcaacagagtctcgctctatcgcccaggctggagtgcagtggtgcgatctcagctcacctcaacctccgccacctgggttcaagtgattctcctgcctcagcctcccaaatagctgggattacagacgtgtgccaccacacctgggctaattttgtatttttagtagaaatggggtttcactgtattggtcaggctggtctcgaactcctgacctcaagtgattcgctggtcttggcttcccaaatgctaggattacggacgtgagccaccgtgcctggcccttcctctcctttttaaattacatcatttgtccttcatttccattttgacaaggtgacattttctgagcacactactattaccagagatggtaatgggttcaggtacaatggtgtgtgacactgggcaagttaagatacgaaaaagtggtaacagttctttccatttaccctcccttcttttttatttctgtctccgctgtgttgtcagtatgataaattcagaaattgaatctgtgaagggacttcccgaacaatgtggagcttctatccttgaaccaagggtgctgagggctaagacttgaaacttgaaaaaaaattttcagacctaagttttactttttagtcacacatacttctttctctcaggtgtgcaagtaaaagttgacttacttttacaaagaaacaactagggaaaaggagaattattaaattttgtttctcaggcgtggtggctcatacctgtaatcccagcactttgggaggcttaggtgggcagatcacttgaggtcaggagttcaagatcagcctggccaacatgctgaaatgccgtctctactaaaaatacaaatattagccaggcatggtggtgcatgcctgcggtcctagctatttgggaggctgaggcaggagaatcgcttgaactcgggaggtggaggttgcagtgagccgagattgtgccactgcaccaaaaaaaaaaaaaaaattgtttctaacttgtttattttctaaatataaattagtcattattctttagttatttaaggagagaaaatgaacatattttttatggtctaccacatttgaaagtatattatagcaacattaaatggactaagacaaaaaaagacaaatagactatataacaagattcagatacttctacctctaattttttcaaatgaaaattttcagccaaaaaggagtgaaataaagtgaccaaatagcatattctacttcttacacttctttgaatagtacttctatttccagtcttctctctctattgacaatgcgggaggcataggcttgatgtgcttggtgggaaaggggagcttatgagctcactgactggaagatgtgttcatagtgaactgtaaggtgcaggcttctgaatgggagtttgttttgagcaatgggttttaaaacgtctttgtagaaaagctttatgcctatggatggtttaaaatacaccccaattctttattgtacgcagggaaggattttttttttttttttttgagatagggtctgactttgtcacctagagtgcagtggcgtgatcttggctcattgcggcctccacctcccaggctcaagcagtcctcctgcctcagcccccgcaagtggctgggactacacatgagcaccaccacacccagctagttttatgtgtttttcatagagatggggattcaccgtgttgcccaggctggtctcgaactactgagctcaagtgatctgcctgccttggtttcccaaagtgtttggattacaggcatgagccactgcacccagtcaggactttttattcaaatggatttttcggttttctttaggaattaggtgatgctcaagaggagaaatcagatgaaataagttgaaaatctaaattgtgtgttattttttaaaaaatgcagttttaatattttcaagtagatacagaaataccaaataaaaatgttgtaaagtataggttataaaattttgttaataaatgaagattgtttacagttagcagagttcattttatttttactcagacaatttaaagttcgacactcatttattgaacaaatactgttaaatatctaccgtgtgcccagtcaatcaccttgtagtgtgcagaacagattcaacatggacaaactaggctgggaggaggctgacgagtttgtcgttttaaggcaggtgagagattattatggcctaaactaattaatgtgttaggtgttgggatggaagaaaacaaataattttaagagattttaaaaactcttttttgatacaatatggaatgcatgtaagaaatagaataaaacaggtgtatagttaagtaaattataaagtaagcaccctcataaccactacctaggtctagaaatagaactttcacagccacccagaagtcctgtacgtgaaccaacccagccagaactctcccttccctctaaaagtaaccagtgttctgggttttatagttatcatgcctttgcttattatacttatcacatctgatccttactatcatagtattgttatcttgtattatatgttaaattaatatcattcctaggtatcatccctaagaattatgtctttgttttgtctgtttttcaaaaatatgctttaaatctcttaattaccgatttgcccttaattcctccttttttttctcgtgcagttggagcatttcttggcttattagctggaatgacaattccatcatctttgtaatatccatgtttatttcagtggaatgacttctctcctggttgtaggtcatattttcctacttcgtgtgtatagaatttgtggtatgatggacattttggacacaaggtgattgagtatctggattttggtaccttccttaatgaagggttgttttgtctggcaagagttaatttacttggggattaacttgatcctttcaagacttgcttttaaactctgttaggcctggtttagaatagccttttctctaggctacatcagctctactcctaagcttgaccttttagtgtctctactaaatgcctctgctgttctccccactatttggaacttgaatttttcccagccctatggggttcaggtagttactcaactcatggctctctgatagttgctctttctccagtagctcttgatcttattttgtggcagcttgccctatacatgcacagcttagtatttggccaaagactcaaggggacccttgtcaggttagacagtgctgcttttctggtaagctcccttctctgtgttttgtttttaatttttaatttttttttttttttttgagacagagtctcactctgttgcccaagctggagtgcaatgtcgcgatctcggctgactgtaacctctgccccccaggttcaagcgattctccttcctcagcctcccgagtagctgggattgcaggtgccccccaccatgctcagctactttttgtatttttggaagagacggggttttgccatgtttgccaggctggtcttgaactcctggcctcaagtgatctgcccgccttggcctcccaaagtgctgggattacaggcgtgagccatggtgcccggacctctggtattttgctccgcaaagttttgcagattaatgggaaccttactcattaaactgtctttggagctttgcaagactgctgttctttgtttgggctttccctccctacgccccatactagacatatctgggccatcaccttgtttattttctctcaaggatcatagtcctgtattgcttgttatccagggtctgaaaacagttatttcatgcattttgtttaattttatgatagtttatgacaggaaggcccatctcaccttatggtcaaagtgagaagtataatggtaaatttattgaaagatttaaagcagattaatgccatgatttgtggatattttatcaagatcaccctggtgctctcttgaaaatagacaaaggaggtggaagaaagctaactagaggctgttgcaaactagactggaaatggggtgaaatggttagactcaagaaatacttccgcactagaacagttaggacctgctgttgacttggttgtgggaaatgaatatcaggaggagaaaaaggagagctttggtgtttggcttgagccactggaatggcagtgccatttaatgagacagagaagactcatctctcatcagagtcaccagatgatgggtgagattgaagaagaggaaatcaagaattttttttgataaaataagtgtgagttgcctgttagacatctaaatagagatgccaaatgggcagttggatgtatgagtcctgaaatcagagcagagggcaggcctagaaattcatcagcatttccgttgtattttaaaccatgtagtagattaaagagtttagatggaaaagagaaaaaggttagaactgatcacctggtcactggtctaatttagacctggaggtctgatttagaaggaagaacctgtgaaggaaacagagaaagtgcaactggagagtgagaactaaaaacaggagagtgtgatgtcctaatagtcaagagaaaacaagtgtctaggagggattgggccgttgctttgaatgcttctgagagttccagggagatgaggacagaaatgtgtttgttagagttggtaacttagaattcgttggtggtcttgatgagttgtttcaatggaggggtagagaaacaagccagattaggctgcttttatgaggtaaagggaatcttgtatgtctgaaatattttaaaattaattaaaataaaaagagtgaatgggagagggagaggaagaaggagagatagcaggtgtggaccagctgtcttcagggcaggcatttgaacaccttggagttcacagagactctgcagtggtgtgtgggcagtttcagattctcaactcccatgtgtcattctctggattttagttggccgaaaacatacctgtgagatcatctttcccctccctttttatggttgcactttgcccactctaactcctgttcatccttcagctctcaggtgttccttaggaaactttacaagatcccaagactacgtcaggatctcctaattactctcttacagtattgtggatattttctttataacactttttacatatgaattatacagttacttaaaaagtattttcattcatttgacaaatatttgagtactatcattgtactgtgtattgttctgggtgctgatatacatcagagaataaaaaagaaaaattcctgggataggagagacaaacaataaacaaacagttataaataccaagaaaaaagtagatcttggttagggagattggggatgtatattagagtcaaatcataagtgaaaatggggtaataaggatgagcctgcttgagactttgattttttttttttttttttttttttttttttttgacagagtcttgctctgtcacccaggctggactgcagtggcaccatctcggctcactgcaacctccacctcctgggttcaagccattctcctgcctcagcctccccagtagctgggattgcaggtgcgcaccaccaggcccagctaatttttttgtatttttagtagagataagattttaccatgttggccaggctggtcttgaactcctgacctcgtgatccacccgcctcggcctcccaaagtgctgggattacaggcatgaaccaccgctcccagccgagactttgacttttgaacagacttcaacagttaagggaaggagagagcctgtcaaagggagcagtgagtgaaaggccttaagtcaagagggtgactgacatgttgaggaaaagcaaagaggtgagtctggctggagccgactggatgagagagaggagtataagagatgaggccagagaggtaacagggccggatcatgtagagccttctaggtcagcataaggactgtgacttttactgtgagtaaaacgagaagcttttgataattgcaagcatattttgacttctgctttaaaaagatcactctagatgctctattgtgaatggtgagatagatttgggagactgttggtgtaatccaggcaaaagataatggtggcttagagcagtgtgatggtggaggtggtaagtttcaggatatattttgaaaatgggaagagcaggatttcctgatgagttggatataggtgtaagaaaaaaagagactcctatgtttttggcttgaacaactggctggatgcataccatgaatcaaggcaggatgagtgaagcaagtttagaggggaaggccaggaggtcacttgcagatgtgttaacagtggggcagatatttgatactccaggaaagtaaaggtacatacgagtatggatttcagtaggaggtaaacatttgggagttatcagtatgtgcatgatactgaacggtaaataccaagggaatgagtataggtggaaaagagaagcctacaaaggactgatgcttgggacactcctgaggagttgggaagaaaagcttagggtaagataggaggaaaagcttagggtgccataccttgaaagccaaggaaagagagtagaataaggaagagggattgagcagttgggtaaaatgctgctggtcaggtacagtgactaaggatgcatcatgggtgctagcaatgtggaggtcgtcagtgaccctgatgaattgcatagatgattatttgattaaactctatttttcctattaaagcttccatgataaaagggaccaaatatgttatttctcattattatatctccaaaacttagttcctggagtgcataaatgggataaatacataggtcccagagcctctgggaggactagagaactgggctccgaagttatatagacaagaataatgcctcgaatcaatcacacttctatattgctttagtgatgacagtgctgcgtggcacaggcatgtgagtgtgttacgccgacatcactgacactgctcaccaccactggagcctctgctgttggtgtgtctggaagcctgaggtagctgctgcctctgccacccactgctggaattgtctgtaaatattcatgtcccggcttcttcatgtcacaagattctgtttcaaagtacatgacgaatgtgtctgattgaggtgattaggtcatgtacctgggctttaatcacaagaaaggctgggcaacaagtatgtggcattttcaatttctgttgtgggaggtagactctgcctttaaatgtggagttcccacacatgctaaggaattcagatatcacacggcgaggaagagtgatgaatgcctgccacggtgcgagataaatagattttgtggggtatacgtgtaaaggtaatagttgaaaccataggattagggaagggctattttggatggttatttgtacgggttgttcaccaaacaagagcttcctgctgatggagcccgtaggccctaaaattcagcctgtgcttcatggtgatgttgcatctacccaagaagggttgctttttttctaattcgcataaagttactctgtggattagtgaaggctttggattcaggctatagaatccagatgttccaaggacaggaatttagaaaatgtctgcaggtaggaaaggaaaagggtggagtttagagctaggataattctttaatggaagccggttgaaaattttaaagacgttccttctttaacttaaatttttttttttctggtaccagctagagtttgcaaaggaggtgaactgacaataactattaggtttagaaacaaggaggttttttatttgctattttagatcgtatggttcagtggagaggtgaggatagaaactggctgatcattcattcatcattcattccttcatctaacaaaagaggaacagatagagaggagaagtaatttttaacgactgcttacatatcagacagtgcctgaggaatacagaagacagtttctaaaagagttcacagtatggtatgttagagaagaaaaactattgctaatacaatggggtaagtgctcatggagctatgtaagctgtgtagcatgctgtatgagaaataggaggtgtacaaaattcagcacaggagtaggaagggactaaaatatttcctttctagctaattcttgaacgtttggtagccatttcattcattcagtattcattccttaaatgtctattaagcgcttaccagtgtggcagctactgttgtaggtgctttggatccatcagtgaatgaatgaaacaaagatcttagcttttgtggagcgtacattctcgtagagaataataagtaaacataataaatcataaaatatgttagagggtaagtgctatacacaggaaaaagtagagcgaagtaaaggggaaggacacatgcgttcttttttggctgtgttaaattttaaaataaggtgtagattatactgaaaacgttgaacattcattttgttatgaaaaatttcaagcctacacaaaagcagtaagaactgcatgatgaatctccacatgctcatcactcagatacaccagtttcgaaaattttgccacacttcctccatgtattcttttttctttttcctcttttctttaccaaagattttaaagccaatccctggcatgacgtcattttcctctgcagactttaatatgcgtctctaaaatatatggacattttcttgcatagcgacaatggcattatcacaacaactaaacctaatactaacacaaaagaggcatttgagccaagactggaaagaagtgaagtcttcccctagcagcttgtgcaaagggcttaaggatcaggagcatgcttagcatatttgaggagcagcaaggagtccatagtggctaaagcatggagacccagggaagagcgatgagatgaggcctttgcaggctgccgagaggacttgggctctagttggagtcgaatggggagccatgacagggttttcagcagaggactgacaaggacaactttatgtttacaagggtcacttgaagtgctccattaagaaaacactgtagtggagcaagataaagcagagctcagttagaaggttgttatggattaaaaggtatatttttgtttagtggttcattccaggtggtggccgtggagatggcaagaagtgcttggattttgggtatgttttgaagctagagctaactggatttcctgactgcggcttgagagcgaaaggaaggcattaagaagactcataggtttgtggcctgagtaacaggaaggatggagcaggtttgggggcaccatcaggagtagagatgacatcttgccatgttgcccaggctggtctcgaacccctgggccaaagtgaccctcctgccttggcctcccaaagtgctgggattacaggtatgagtcatcacgcttggtcaggagttgagttttgagcatgtagagtttgaaatgtttgttggacatgaaagtgagatgactaggtggatagttaaagctggaagtagggagagaggcagcagaaagcattcatctctgtattccctggattcccaagagcctgtccccagggtacttggaagtactgactgatttatttagagacattcacagagtctgacaagaaaatcactgaagtggtttggtaacctggaaggctctgatatcccttccttccttttctatcctgaactcagtaaaatttgggtaaaaaaaaaaaaaaaagctatgtttttctgacattttctgaacctgaactacttaggaaacttgttcaacagtgtcatgtttttcttcctaactgtagcaccactagagagcgagcttcatcgtaggtaaccaggtggtggttattctgggggtggatgccgtggaaaggatgttgtcaacacagattgctttccacagctgcagtcagcaatgcagactgattgtgatggtatttatttctccttttaaaagggagcatttctaatccccattttggatcatttggaattctgattatatttcccggagttatgtggaagattgacacacaacctgaggatgtgaaatcgtagtttcagctgttatggtagctcgtgtctgtgtgactgattttaaataactaggtgttcagagatagggatcctcctatgcctgcatggttgagtgagcctgaatgcagtctgtggattccctgattcacagggaaaggttggtaacacagaaggggtcattgtctcataaggctgtagtgatcttttgcatacatcggctctcactcctctttgaaaaaaatgagggtgaacaggagagcactgaatctctttctgcctcttttctacaggagatgcatcgaaggtttgagaatgctcctgattctgccaaaacaaaagctctgcaaactgttattgagatgaaggtaagtgagaatctagtaaagaatcttatgaattaccttatacttttaagtgatcaaaaacttccatgtgtgagtgttaggaaatggcatgtaatagtatttcacttatttggagattaagagtgagaatcaatgaaaatgacatcttaaaagaatttcagttttatttccttttacttgtagaccataattcaaattggaccaaaaagagttgaacagaatttctttaaatcagctattcgcagatgtcttggtctcaggacccctttattctcttaaaatgacagactcacttccttcattttaagaaaatgtctgccagataccaagtctgggtaaccatagcttgtcagttttctttcaagtaaaaatagtgttccgtgaagaaaatactgaattcagtttacaactcaaagcaacacgagtcctgtgcttagggacagccatcgtatttcagtacgcagcttcattccatttgtcacacacaatattaaaagtatgtgtactccagagttgagatttttttttattattttttatttttattttttgagatggagtctcgctctgtcgcctaggctggagtgcagtggcgtgatcttggctcactgcaagctccgtctcccgggttcacgccattctcctgcctcagcctcccaagtagctgggaccacaggcgcctgccaccacgcccagctaattttttgtatttttagtagagatggggtttcaccgtgttagccaggatggtctccatctcctgacctcgttatccgcccgcctcggcctcccaaagtgctgggattacaggtgtgagccaccgcacctggccaagatttattaaaagtaatactttttactgcttcttcaagggcggtattaaatgaagtagtcttttaaaaattttatttcttatttttcatttttttcctacaagtacttgacgtgacaaatattaatataatgactacaagtatggtttgatgccattgccttgatttgtgctaaggcactagcagttttgcccatcattgctgtatatctttagtgcagacagtggaaaagtcaagtgacatcatggtattattgtgaaaatagttttgatcatgcatactttgtgaaagggttgagggtaccctgagagttccatagaccatcctttgaaaacctctgccttaagttaatgaatatttagaaatctttaggctgttcagtatagtgattaagagcttgctttctaagttaaactccctggattcaaaatctcgcttcacttaaccaactgtaagatatggagcaaattacctatgcctcagtttctttatcaacaaatggtgatagtaatagtactcatccagtgggtcgttttgaggtttaaattagttaaaacatgtaaaaacactttgaacaggacctagcgcatagtaaacattcaatccatactagctgttgcagctgttatttttgttcacaatctgttctttctcataaaagttcatgtagttagggacctccccccacaactacttcttcatatcctctagaaagctcaatactgtgttttgcattgtgggccttcatttaatatttgttgatatgacaagaatatttagtcaatggtatataaataattttatgtaaatagatacttctgaagtagttatgggaactgttgtcttaatttggatgatttcctcttaaaactttatatcgtatacatctttattctcggtggggaaaggatttaccaaacaaattccgaattagtggattctgggttctttgtagttaattggtagtcttgagtataatcttgtaaagggcctttagaatcgttcagttgcatggttttaccctttccacattcaccacaagtttgttgtgttatttcctgatcccttgttaacacctaagaataaaacacatgaatgtacctatgtccacaaaatgatttgtttaactgccttttgacagaatgaggacgagtaatagtattacttggtggcaatggatgcattttaagttgtgtgaaccttcagccattctgctaagaaggagaaagattctggtggcccagtggggtcaagaggatgtgatgctgaaatcacaacagaaatagctgtgttgctgagaatgtggaatgagcttcagagaattatgaaaatctagtgtagtctttagggaaaatagggaagaaaggtgattgaagtaaaagagcccagtaatcttgaaggtgatgcaattttctttgccctctcctctttcgcctcttcttcctctctttcctcttcttatcccttctcccaccattttccctcattccagcctttccttctttgttcctcttcttctctttctcttcctcccctttctctactatttttttgtttgtttgtttgtttgtttttcctttaccagtggaggaacagggaagaatgactgtactgctctagggttagagttttgctgggatagataaagcagagcgagtgattgggatgcaaatgaattgagggtgatgatgacagagtagtttggacgttggtcctggactgtaccctggatctggaaagagtaaaattcaggtggactgacaggttgggagaaaatgtaaaagttaggaaagtggaattctctgtgaggttgaacaggaaataatcagagtgagggtatgacaggccaggggaagagagttctggatgatgataggatccatcagtcctataaactggatcacccaaatggactggaggatgagatcattgcaattaagggcgtcaaagaattctgacattgcaatcctcggattatggcaagagtggtgattgaaggggatattgtaagccaggtgccaaagacttccaaaaatgggcaggagtgatggagaagtccctggatggcagcaatggggagggtagggtgaaaaggagtatgagctttccataaagggaaacagccttgaagaactgggagaatgtcaaccctttcccctgctcctttgtggtgttggggtgttattgaccttcactggagagagttcatgggaaaaaggttgagaatttggggaatttgacaaagagcagaggatttcagtaagtccagtgggattggttggttaatgatggaagggctggggctggggaagtacagagtagtaaagtgaaaaggaatttttttatttaaatattacacattctaggaataagaaacctggttggaatgactttccttaaacccagcattggtacccgttgggttggtgctagaactagttgagagtatcaggccttaattttctggcctgatttccttggtaggttcttcttctggtcagtcagtacctgcctcctggttttcagagctggagtcatgatccctttttgggaagaaggttttatggctcatgatttggtagtgagggtgctaatttgtcaaaagctgcctttgtctgtgtttagggtaggggagaagttagattatatttttaagggccttgtagagactttctagaggctctgtacaggttccggctgccatgtgatgtacagagttggagttcttacctgggactaaattgtcttgagtggagccccagtgctgctggagatacacttccctctttcagctggtccagtttcattaccactcaggctgatgacagaggagaacttacctttaactttcactttctttcatttgtaggctagtcatatgcttatgcctagtattttagtcttttttaaggtgctgtgttctgatatttccagagaaattttatagcaatcttaaaagtgaattttcaggtagtgcaattgaagtagtactttttatgggtcagtcattccacatgagtaaataaaaatcctggtttaggtatagaatgactctgattgtattaattcagtacaatggattttgaacaggtacattttaagtttaatttgaatgaatttataaaagacagttttcattgtgatatttttaaaggtcacgtgatgagcaagacagaggaatacatcctctcctcccctcccttgaacctgaaaatagctaggtgtagttttctcgatataaagccttaatctctctcatctttatgctctgagaataaaggagacttaatcaagaaattattgaggtaaagtagaaaaggagttaatttcaaaatagcttccaaaggaatggtttatctaaaactccaagtgaaataaagctaagctatacttaatttatgctctttaaggtctctatttctttggtgagtaagcacctgcagctacagatacataaaactattcattccatgtaggagtctttctgtaattcatgacatgtaaagtagcctggggagaaactaggtactgcgacaaacaaaatcaagagatcgaatatgaaataatgttctgttggaaggtgatatttgtggtagagatgatggtttataaggacagtgatttttaaaaattaagaattattttaaatgtatgaagtacagacaataaggattgctaacatgataaataacttaattattcccccatttttctgcagtgggatgttatgtaatttttattattgcacatatagctgtacacgttactgtataaatctttgaaaccctcttacttttttcccctcctttggggcataatatgttttttaggggtcaccaagtaaaatgataaaatactagaactagaaaaggctttactattaatattggaaatttttttcaccagaaatttgtaatttctgatgcaaagaaattttaaccagtttttcattgcatttacttcttcagtaatttagtaattattttcaactttaatttaaagggtgcagagctggaggcagccatagaagaaaaatcatactgtggatatgagtgcttctcctcccactcaaatggctgtaaaggacgtattttagaaggaaggcactggctgggcatggtggctcacgcccataagcccaccacttttggaggccaagacaggtgtatcacgtgaggtcaggagttcgagaccagcctggccaacatggcaaaaccctgtctctactaaaaatacaaaaattagctgggcatggtagcgtacacttgtaatcccagctacttgggaggctgaggcaggagaactgcttgaacccagaggcagaggttgcagtgagctaagattgcgtcactgcactagagcctgggcgacagactctgtctcaaaaaaaggaagcaaggcaccaattgccagacagcattttttctgtatatttgtctatctttattaaatgtaacttctttaaatatcatgttattcagcttttctgggtttttgtgaatacttcaatcactaaatcttccattgtcttcaggattcaaaaatttcctctatggagcgtgggcttcgagacctggaagaggaaattcagatgctgaaatcgaatggtgctttgagtactgaggaaagggaagaagaaatgaagcaaatggaagtgtatcggagccattctaaatttatgaaaaataaggtaatggcatgtgagacttttgattcttaaaaggagtttgaaaaattgatgcatattttttacttctctagtgatgataaagccgtattttacactcttttatcaggtttcagggaagaatacttttagcatagttctttcaaatgaaacttctccagaattaaagtcagaattactgacatagatagttactacaagtttttacttataaagacaattctctgtatgaggctacatatgtattgtcatggtttaagttttcatatctattagtacttccgaaaaacttccagatgagtttttctcactatatgaaacatcaggttctttacctcttgtgaattatttaaaaagtcaaaaccctaagaggcttgagatggagtttcgctcttgtcacccaggctggagtgcagtggtgtgatctcagctcactgcagcctctgcctccatgttcaagtgattttcctgcctcagcctcccaagtagctgggattacaggtgcgtaccaccacacctggctaattttttgtattttttgtagagatggggtttcaccttgttggcctggctggtcttgaactcctgacctcaggtgatccacccacttcaatctcccaaagtgctgggattacagacgtgagccaccgtgcccagccctaagaggctttttaatgaaatgggtgaaatgaagttacgtttcccctccaaatacagttctgtaacggaaagccctttctttgccctatcctgtggggaagatccacttgctgtcaggtttattgcttcccatgtgcacttcaggcgtaatatgacaaagattgataccaccaagacctatcagtctgtgtttatcatcagtcacaatgttccttccttgtatccaaagtcatttagtttgattctgtaaactatttaggcaagttggaggatttagtttatcacaattatcaatttaccagttttgttgtggtttcattaaacattatgattgtaattataaagtttaagccagaaaataagtgttttccccctttatttcccagttgtattctccaggttcttagaaatgaaacccgcaacatcccagtagtgtgaaggaatgataacatcacttcccctccagtttctggcttcttgccatggtgcccatacctggcatataagtctacagaatattcctctgctacctccagactctattattaattatttctactactttcatttcagttttagaaattaaaaactcacatacccaactttttttttttttctttttctttttttttgagtcggaggtatgctttgtcgaccaggctggagtgcagtggcgtgatctcggttcactgcagcctccgtctccagggttcaagcttcagtctgctgagtagctgggattacaggcgcccaccaccatgcccagttaatttttgtagttttagtagagacgggtttcactatgatggccaggcaggtctcgaactcctgacctcaagtgatcctcctgccttggcctcccacggtgctgggatataatcataggtgtgagctgctgcgcctggcctcacataaccaactttctattagtttggatttttcaccctgatttgagaacaagacatagtgccgtatgatctctgtgtttatgtttttcatttgttgattagcacattccagtccactgtggggggaaaaaacctgtgaacttagaaactacctatggctctttgaagagggaatgaggggaacagatttgattgtattatataagttattgttatttctagttaccattctgcctcaaaagtagacaagaagaagacctaagttgacacataagtgaaaaagaataataatgtcgtgacaggtagaacaactgaaggaggaactaagttcgaaagaggctcaatgggaggagctgaaaaagaaagcggctggtcttcaggctgaggtctttgccgtaagatttacctctttgtgtgcagtggtcccacagtgggaccctgctagctctatggcttctgggtggcttaccctttcattctctatggttggcagctttgcccattactagcactaaccagcctgctctgctctttaactgactcctgttcactagtttgacccacatgtcactttgtgtgcagtgagccttcacgtgttctggaagccttgtacctggtactttattgttgcttttgtcactctgtggatggtatttcaaagcctgtttctttctcaaccctttattgttggtttatatgaatggcggccttcttttcttcctaggtacaagaatatatgcagttgttctaggcctatcacctagagtttatttgaatttgaaactcttgagcaaagtgctttaccttatgtagacattatctttaagtctccagtgagtgattttgccacaaatgttactttctttaggacagatgtatagaaagtatttatctagtaaattgaaattactaagagacttatttcaggtatctaaatctagttcaatattctaatgaacttaaaatttcaattcagaacataataataaaataaatacagttggccctccatatctgtggatttgcatctgtgtgtttaaccaactgttttttattttcagggtaaaaaaatggatgttgtgtctgtgctgaacatgtacaggcttttttcccatgtcattattccctaagcaatacagtatgacaactatttacattgtaaatatttacattgtattacgtattacaagtaatctagagatgatttaaactatactggaggatgtgcataggttatatgcaaattctacatcattttatatcagggacttcagccttcattaattttggtatccaaggtgtgtcttggaaccagtcccccatggacccatggataccgagggatggctgaataataaagtagctaacacttgcacacttactgtaaacattttataacgtgctgagttagacatattatcaactccaaattatagacgaggaaactgaggtaacagaatggtgcctaggaaaacacagctagtaagaggcaggatttggttttatacaggcagtcttcttccacatactgcttacaagttctttactgacctatactaggctgtgcacacatttgtcaaagtgtcagcaaaaactgcttctgaaaataattgtggctaagactggaataaaaaaatacagcatttaaaaaaccaaacttgggctacttttgtagatttgctatttatggtccactttatagtatatattaaaaagggaaatattttggtggaaagggtctaatttggtttatggaaaccatatattggctagagggaaggttgatcaataacttcctttttaaaatagctactattagtaatttctgcattgagtcagacaacaggctaagcacatttcacgctttattttactgaatccataaacagtacagtggcattcgtataatttctccttattactaattaggaaactgattaggaaagtaattattcagggacacatagctagcttagttctgataggtgaatgtctgcaaagccttgtgctcctaagctttgtattatatttgcttcccctttataatgtcttcccttctcagtctttaaggaaaatttgtgcttctaaactctgcttttcttttctttttttctttttctttatttttttgagacagagtctttctctgtcgccaggctggagtgcagtggcgagatctcggctcactgcaacctctgactccctggttcaagcgattctcctgcctcagcctcctgagtagctgggattacaggcatgcgccaccatgcccagctgatttttgtatttttagtagagatgggtttcactatgttggccaggatggtcttgatctcctgaccttgtgatccacccgcctcggccttccaaagtgcaatgattacaggcgtgagccactgcacccggcctaaaccctgcttttcatttaaaatattttcttttctttcttagtctttaaggtcaatatagcattatttgaagcttacttaataatgcagatgatgacgaaacagatttttatatttatttttgaccacgtgattggaggtagctggaaatttgaataatcttagtcatagttctttagctgagaaaatggtaacactttgaacatcccccaaaatattcattcatacaacaaatgtgtttttgttacaatcagtgtgttagggaatggaatagtgttaatgggttgtttttattggtgaagggatatcataaaagactccacgttgttacagtgtgtgctaactcttgggtacatactattttgcaggatgaatatagccaccgtttaaaattatcttccactgatgtttttagtatcctcaggtactttgtatacaataagcatacagaaatatttgttgaatgaatgaataactatatctctaaaaagagattttatgcatatgagaaaaatacttaatcttttttgaaacagaaggctaaattggaaatttatttttggtgttcctcaaaggtctaattttaattaatgtgaaatttatttcttcatgggaaattgttctcaaaagctttatcccttatacctaagattattacaattacaatactttagatacattcaagtttttgaaaatgaaaagataactttttgtttcatcagtgacaccgaaattactgacttgtcaaatgtatacttccaataattagtatcttttttagttccttgttaggtggtagacataatttaaaaggagatgtaatttctgtttacatggcttccatttagggtaaaaaactatttttaaaattcttagaaaacaggaatgtaaagaaggtgttagaaagaaaatactttcaatgttaagagagaaattaatcaatacacataacatcaaattataggattttacaaaaccatgttatgtataacattaaaagtggctttttaagataagaattttatgcaaacttttgagaatgaaaaagataacagtgaaaaattagcacaacagcagcagattttgaattttaaatagtactaggaggtttctaaaaccttttttgttatatctgcactcatcctgcatttgatccatcatgttctgaagaggtctcacctagaaaaatgaaaaccatttcatcagtacagtggtgttcagttgcttactgctgtctcatagtcatctaattgaattggaatttcctttccctccattccctttctaagaggtttcaaagaatatttagaagacacaataaatgaaaactggacatttccctattggttgaataagtttagtggttttttttggctcagggttggggagatccaaggttatgtcatgcaaaaagatgaatatgacctatcacacagttcgtgctgcatttagtttcatattttgtgactcagatctgtgaaagatacagataagaggtgtttgttttatttcttttttccttaaagtgttttacttcttttctagattggccaggtgaaacaggagctgtccagaaaggacacagaactactcgccctgcagacaaagctagaaacactcacaaaccagttctcagatagtaaacagcacattgaagtgttgaaggagtccttgactgctaaggagcagagggctgccatcctgcagactgaggtagaaacaattctgggatttgtggggagttggtttcttggcaccttttcataagcgttacctgtgctgtttttgttatgtttagaattgggaaatatgagtaatgttatgattaattcttcagcagcgtgatcagtcactgtgctaaaatgtaaccatcttatttcagttgttcttagatctaacaagttaaaacaggtgcagtttatgtttttaattctttaaacttttgccaagtctgtacttcaaagtatactctgacagtattaaaaataaaaggataattgtaaaagagaaatcattgatttagaagcttcagttcaacccctggtgaattttctagtcatgaatgacaatgagcttggttacactgtgtttggagtacatttaagtgtctttaagttgtgatattatgaataactgtatataggaaactggaatctgttaaagttctagatagtctaattttaaaccacagattattagacaatgtgtcttcatatcctgtttgaaaataaagttagtgtttttagaattttttttttttttttgagatggcctctcgctctgttgcccaggctggagtgcagtggtgtgatcttggcttggcgtgatcttggctcaccactacctccgcctcctggattcaggtgattctcctgcctcagcctcctgagtagctgggattataggcgcatgccaccaagcctggctaatttttgtatttttagtggagatggggtttcaccatattggccaggctggtctcgaactcctgacctcttgatccgcccgcctctgcctcccaaagtgctgggattacaggcatgagccaccatgcccgggcagtgtttttcaaaatcttggaagatgatctagactattggctatgacttcagttaggtatccaccatcttcagataggtatatgacttcagatagatatttagtgtatttgctaaataatcccagatcgattcttatctatcttactttcaatgatcgaagagaaagagttgatgataccatgtggatttactgtcttaatataaatattttttaaaggttgcagtgaaatagataatttaagaatagataagtagttttgctttatagaagaaacataaagcatatgatgtagattagctttttttctttaaagaaaaataagaacataatttggtggaaaaaaggaatgaggaggaaaagaaagaataaaaacctcatagtcttagaagacaagaatcttccaataaggaagaatgaagaaggaacctaaactgtttcatgtaatatttttatctgtacaatttggggctttgttaaaaatgggagattttagctgacatgtttgtcatttttcttataacttacactttttctattttagttatgtttcattttgttatgatgtcagctccattctacctcacagagatatttgggtataaaatcatgagatgcagtagtggctaaggctttggctctagagtcatgtttactgagtttggacttccatctttaccacttactatgagtcgcgtgatcctgggaacgtattcaacttccttacacttcacttttcacgtctgtaaggtgaagagaatagtagtgcttaactcataagtttgttgttagaattaaactcgtttatttactgccagtgtctggcacatagtaaagtctttgtacattcgtcattgttatcattttataattcttctaataaaatcaactaatgcatatactgttgagatgttaagagaacatagtatttagatgatctgcattttcttacttttattaagctaaacttaggtttattcagggaattataaatatgaaatcatctagataatgttacctgcaaagttattcatttatagctttattttaaaaattttttgtgggtgcatagtaggtatatatatttatggggtatgtgagatatttaatacaggcatacaatgtgaaaataaattatggagaatggcggtatccatcccctcaatcgtgtatcctttgagttacaaacaatccaattacactctttaagttattttaaaatgtaatagctttattaatcgtttttcacttcagtagcttgagtgcatgcaatacagcaaaagggtcagaagagggtgccagtgttctagaggtcagccgcacttccaagtttgctactgtaatagctttggatggaggtggcaggtgtacaaaccagagaaccaagcagttggttaatgataatgcaaacatttaaaagcttgtcacagtctaataaatgacttttcccccttggcaatccatgcttctctttgtacccccctcaaataatattcttattagccaggtctcacccagatgggcttgtgattggtttcttgtaccatagagaatagattgtatttattgtcattcatgaatggtttttagtttttagccattgcaggagtagctgagtctcagtgattatttctgtaagttactagggccactgcgcaaatagaaccatctcatcataaaagataaaagaatgaaagctaactttctttggaatttgggatgattttaagaatgtaatatgtctatttattagcattgcttaaaaaattactctggtggcacttgacaagagtcaccttttccaatgtaacttgccagtgttagagcccagtaaaaggcagtttataccagctctttgaaagttttcatgtgtttctataatttgctcttagttgatttcatcttttctgcagctatcccagacttcgatctaacactcggattactaaattaagtatatatgaaaaaagaacatggagcatggagtttttctttcatttttatttttagagatagaatcttactctgtcacccaagctggagtgcagtggcatgattatattaatagctcattgcagcctggaactcctgggatcaaacgcttctcctgcctcagcctcctgagtagccaagacttataggcatgtgccaccacacctggctaatttttaaaactttttgcagagacagagtctcactgtgttgcctaggctggtctgggactcctgagctcaagcaatcctcctgcctctgcctcccaaagtgctcggattacaggcgtgagccactgtgcctagcctggagtttaaaaaattttaaaaatcctttaaggaaaacagttacatgtgaaaagatctgtttgttttttgttttgttttgttttttttgttttttttttccctattcagggtacatggactaaggccctctggtgttatacaaggtacagtatatatggaatcgctcccgttttgtaaccatctcttttaatctgatgactttcacagaggtggtctggatttagtaatatagtggttaaaagcatggtctttggtgtcagacataggcttgaaaaccagccctctacctttactagttgtgtgaccttagaggagttactttacttcttctttgtgtgtgtgtgtgtgtgtgtgtgtgtgtgtgtgtgtgtgtgtgtgtgtgtgtgtgtgagatggagttttgctcttgttgcccaggctggagtgcaatagcacaatcttggctcaccacaacctcgcctcctgggttcaagcgattctcctgccacagcctcccgagtagctgggattataggcatgtgccaccacacctggctaattctgtatttttagtagagatggggtttctccctgttggtcaggctggtctcgaactcccgacctcaggtgatctgtcctcctcagccacccaaagtgctgggattacaggtgtgagccaccgcatccattcaggagttactttacttctttaagcctccatttcctcatctataaaatgaggataatgataataacaacttcctaaggtttttatgactaggtgtttaattctgttctcatctgaatatggagggacatttttttattaatttattattttttttttgcgacaaggtttcactttgtcattcaggctgtagtgcagtgccttgatcatagctcactgtaaccttgaacttctgggctcaggtgatcctcccacttcagcatcttgagtagctaggactacagatgcaggccacctctcctggctgattttttaatttgtattttttgtagagacagggtctcactatgttgcccaggatgttcttgaactcctggcttcaagcagtcctcctgcctcagcccccaaagcacaagaattataggcaggagccactgtgtccagccatggagggaaatttaaattcagtgggttaaaaaatttcgaaacaccttacagtttatagcactttgatttgatttgatctttattgttttatttgctcttcatagtaatggcatgggttagacaagataattattgttgttttgcttttataattgagaattttgtgaactgcttattagcataccacttttgactggcacttgaggctactctcactagtaacactgggacttttgatatatcatttacagtattctcaagaattaaagttcttttcttgttccaaaattgtgatgctatactagggacctaccattaaatgtattttcaggatgaattctcaatgtgcagagcagagctgattgtatcaataagccaaaataatgtacaccttactgcttcaaagtagtacaggtttttccccttctccaggaaattgtgttttggaattctgtttattataggtaaggaatataatctatatcttagtaatagtaagaggaagtggttctttttttcggaggtgctcaggagatcagcatctagcacaaggtgaggacctgcccttgctctaggatgttttggcactaggcactagagctaggatgctgttgtttgacgtgcaccctctgcttgcagtcccagcccagttctgacttcttcagcatactaagagttagtaatacattcttagaactagagggcatttttagagatcatccagtctttccgtaatttaaagaatatgtatgataatatctaacctgagtcttgtaccatggagggtttgtatactttcattttcccagttaattcttagagtaaccttctaagaaataagaattgttgtaacattttacagatggggagttaaaacttagagagactgaggttacatgacctagtgcccgatcgattcaaacccgcaaacttgcgttcttgatcataacgctgcaattcctccctgtgcagagagaatatagtgacatgctgaaggcctatacaactacttggtattagttttgggactggaattcatcatttctgacttcgctaattatgatgtgcatagacgaccatgactcttgtttgattggtaggttgaggactagccacaaagaaagatggggagaagaagaaacaattcatgttggtagagaggagaaaaggatttaggttgatggaattacatagcctcagaaagagataggcatcttttgtgacgagattgtgaaagaagagaaagatgtattgattgatctcttcattcaacacggttttgggagtacctgctgagaacccttctgagcactggggatacagtggcaaatgaaacaaaggctgatgatctctatctctatctctatctctatctctatctctatctatctctatctctatctctatctctatctgtgtctctatctctatctctatctctatctctatctatctctatctctatctctatctatctctatctctatctatctctatctctatctctatctctatctctatctctatctgtgtctctatctctatctatctctatctctatctctatctctatctctatctctatctgtgtctctatctctatctctatctctatctctatctctatctctatctgtgtctctatctatctctatctctatctctatctctatctctatctgtgtctctatctctatctctatctctatctctatctatctctatctctatctctatctatctctatctctatctatctatctctatctctatctctatatctctatctctatctgtgtctctatctctatctctatctctatctctatctgtgtctctatctctatctctatctctatctctatctctatctgtgtctctatctctatctctatctctatctctatctgtgtctctatctctatctctatctctatctctatctgtgtctctatctctatctctatctctatctctatctgtgtctctatctctatctctatctctatctgtgtctctatctctatctctatctctatctctatctgtgtctctatctctatctctatctctatctgtgtctctatctctatctctatctctatctctatctgtgtctctatctctatctctatctctatctgtgtctctatctctatctctatctctatctctatctgtgtctctatctctatctctatctctatctctatctctatctgtgtctctatctctatctctatctctatctgtgtctctatctctatctctatctgtgtctctatctctatctctatctctatctgtgtctctatctctatctctatctgtgtctctatctctatctctatctctatctctatctctatctctgcctattgatatatctgtatatatctatctaaatctctgaaacagctgctcagagtaaaagaggactgggtgctatgaaaagagatagggcttagaatctttttcagatgagtgtgtttctctcactgttgtatgtgggttgttgagttatggggtaggggttgggggtgggtgctgcagggtgacactggtatgatattcaagtctgcttgtgaaggtagactggctttggagtgctccttcccctttcagcatcctctctatacctggggcagagcatttgttctagcagcggtacagatgatcatgccagaggcgttctgatctgggaggcttgcttcctgccacaaccactcccccagctccagctggtgagatggcactgcttacggtggtgatggggtaatgtcttgtttgtgggaagatgtagatactgataagcttaagaagttacattaagttacttaagaagataatgataagcttaagaaaatacagttacttaagaagataatgataagcttaagaaaatacaagcataagtatggctcttaatacgctagaaaaatcaaaatggaatgtataagtttcaaaccgtcagagtaaaacccagtttacccagtggagaatagagaagaatggggaggggagagaaagaaatgtgatagcatgtggacaccatgaaaaagaaggctgagataagtacaaatcatgggaaagtcaataaatacaaataagtacttagatcaaaatgaaaatataaatctcagttgggctaaaaagatacagaaagatactgtcaacaagagttaaacagacaaaaagtaacagcaaagttaaaaatacagagatagaaaaaaatttaaaaataaaagttatatcaggaaaataggccttcccaaatatgatttattttaatattgattaaattatcttttaaggcacacagagcaatgttatatgctgataaaagaaacagtagatcaagaaaatataaccgtgccgatcgatgcacctaacagcatggcatttaaatacataaagcgggccgggcgcggcagcccacgcctgtaatcccagcactttgggaggctgaggcgggtggatcacctgagttcaggagttcgagaccagcctggccaacatagtgaaaccctgtctctactgaaaatacaaaaatgagctgggcgtggtggcacgcacctgtagttttcagctacttgagagcctgaggcaggagaattgcttgaacccaggaggtagaggttgcagtgagctaagatcatacccctgggtgacagcgcaagattctgtctataagtaaacaaataaatgtatatatagcagcaatgaggtgaaacagataaatcaacaattgtagttggtcatttggatgtgctcctgtcagaatttgatcaaataaagaagcatcaacataaagttttaataacattaacaagctcaagttcatagatgtgtatatagaattttgtcctaacatagagaataaacaatattttcaagaacttactgaacagtcgtaaaaactaaccatgtactgggtcataaaggaaactttaaaattcccaagagtcaaagtcacatgactttgcactcctaatgcagcaaaattagaaatcaggagtaaagatagtaaagtagtaataaaggtagtaaagaacagcagcagaaaaccaaaataagtatataatcttgaaacatactaccaaaatgacctgtgggttaaaggaaaaatataaacatttaaaaatgagtggcagtgaaagctctctatataaaaatttgtggaacataattagaaaaaaatctgtggggtgtaactaaagcagtatttagagggaaatagctagtttttaacatatttatcagaaaataagaaagaaaagcaagtaatctaggtgttcaaatcaggaaacttagaaaaaacagttaatccaaaaacaataaagaataataaatataaggtgagaaattaatagagaataaaacaacaccaagaggtagttatttgaaaaaggttaataggacaggaacagctcttacagatgataaaggagaagtaactactagtactacagagtttaaaaataatataagacaactctaaacaattatattcgaataagcttgaaaaacaagaagaaataagtttctggaaaaatataaaatgacagaagaagttcaagagataagagaaaacatgaacaacagtcgttatagaaattgaaatggtaatcaacctcatccctttttccctcccaaatcctaaggcccagatggctttcgaggagaaaatatttgatattttctttctttttttttttggagacagattcttgctctttcgcctaggccggagtgcagtggcacaatcttggctcactgcaacctccacctctcaagttcatgtgattctcctgtcccagcctcccaactagctgggactacaggtgcatgccaccacgcccagctaattttttgtatttttagtagaaatggggtttcactgtgttagccaggctggtctcaatctcctgaccttatgatctgcccaccttggcctcccagagtgctgggattacaggcatgagccaccgcgcccagcccaatatttgatattttctatcaaatatttaaaaatagtcattttcatcctcaagttgttccccactccccaagaaaaaacaagaaagcctaatactctacccaaggatatgaggaaaaataaataaattaaaagatactccatgtcaatagatggtataatttaatcctgcagggatatcagttttcctgaagttaatgtatatattcttctgcatttccaattaaaacaccaagcagtcggccgggcacggtggctcacgcctataatcccagcactttgggaggctgaggcaggtggattatctgaggtcaggagttcaagaccagcctggccaacatagtgaaaacccgtctctactaaaaatacaaaattagctgggcacggtggtgcgcacctgtaatctcagctactcggaaggctgaggcaggagaatcacttgaacccaggaggcggaggttacagtgagctgagatcgcaccactgcactccagtctgggtgacaagagcgagactccgtctcaaaacaaaacaaacaaaaaaaacaaacagtattttttaggaattcattttattttaaattttgtaaggaggagttacaaaaagacaaatactacatatgattccacttgtcatacctagagtcaaattcatggagacagaaagtagaaaggtggttaccagcggctgggaaggagagaatgtggagtttaatgggtatagaattttagttttgtaaggtgaaatgagttctggagattggttgcacaacagtgtgaatatactcaacactactgaactgtagacttaaaatgattgagatagcaaattttatgtctgtatatcttacctctattaaatttttaaaaatgtatatggatgaataaagctattctaacattaaacaaaaagagaagagaagatgggagaaccctgccctgtgagacatgaaaatacagagtcataaaccaaacgaaaccaaacagtgcacctcagaacagtgcggtaactagcacaggaaggagcagatatgaaaagaacagggagtgtgaaatcagaaacatttatgtggagagatagtcagtcataaactagtgcaaaattaagcaagtatgagaaaactgacataccatatggagaataaagttggccacctacttcatgctagatgaaacagtgaactctagatggattaaagacctcagtgttaaagagaaactataaagctaatcaataaaaatgtttagtaggaatatattgggtaagataacttaaatgtctccatcaaatttaagcatttctgttcaagaaagaaaaccattggcaaagctaacagatgagattgggagaagagtttttttagagcctcttaaaatagtaaggattcagataaagaataaaaaagagatgcttgaggctaggtgtggtggctcacgcctgtaatcccagccctttgggaggctgaagcgggcggatcatgaggtcaagagatcgacaccattctggccaacatggtgaaaccccgtctctactaaaaataaaaaaattagctgggcgtggtggcacgtgcctgtagtcccagctactcaggaggctgaggcaggagaattgcttgaacccaggaggcggaggttgcagtgagctgagatcatgccactgcactccagcctggcgacagagtgagattctgtctcaaaaaaaaaaaaaaaaaaaaaaaaaaacctcaaaaatcaatagagactatagggagagggaaggatttgaatagacaattaacagataaagaaacctaagtggttaacaactatgccatgatatcatcaatcttactagtaaataaagaaatgcaaatttcaaagatgatgaaatactatattttgttcatcaaattgataaaaattagaatgtgagataacattcagtgcttgtgaggatttgggcaaacagtaacacaaatgacgtaggtggtttcagtaatcccattccttggtatatttcccagaaaaactttcctgctggtccacaaaaggacatgtataaggatgttcaccacagtattatttgtgggaagaaggaattaaaagcagcataagtgtttattactagggggttggataaataaagtattgtggatatgtaccatggaatactgtacaaaagtcaaaagcagtgatgcagaagcagggatagatataagtactatctatgtttacttttttttttttttgagacggagttttactcttgttgcccaggcttgagtgcgatggcgcagtctcggctcactttacagtacttgttacaagtagtgtgttgtttaaaaaacagcatccatcccgttttttaaaagtaaaaaacaggttgaggtatgtaacattaatataaattgaaaacatgtatgaatataaaaatcaccctctgtgtttctaagatacatattcaggaacatattaaaacatattagaatagctgcatattgaaggagggatgggtattggacataaatggaaaaagaggaaaacaaaacaagagtagaacttcacatgaatcaacgataacacttggacagcggatagaccttggtcctaagtgagatagggatctgaagccaagacctccgcataaatctagtactatcctgagaaaggtcggacgagaaaaaaattcctcctaccagtattaatggcaatatgagagactgacttattctccttggctttgattttgtggagaaaggtctctcatcatgcaggtttgagtttgaatagacataactgctctgaagggacattctctcaacctagtacgtgtagattcccacaggtaaaagcattgcttagaatgaatttacaattccacattagttaatcacttgtggattgtaatctcccctgaaccaataatgggagtaagaacaaatggagtgatcagacccttaggaacgctggataatagaacgagagtataaactaaatgattaaaggacggactgagaggcatgggcacactctccagaatggatgatcagatatgacttgttaggatgttgtttcatgactattgagagcaaaagctgaagtagcactaggtttttaatttttattttcttaatttttaatttttatagagacagaacctccttatgttgcccatgctggtcttcagctcctggactcaagtgatcctcccaactcagcctctcgtagtgttaggattacaggcgtgaggcaccgtgcccagctagcactagctgtttagtacagtgtgtttgaatcttgggtctgccacttgctgtatgagtgtatacttttttgcctcagttttctcatctgtgagaagaataatagccttaccccataatgttgtgagaattaaatgttaattatctatgtagtaacactcagtaaatattagctattataattaataaatgcataaagaaatgatttaaaacgcgaggaaaaaaacaaaggtactgtaaataaaaccaaccgggttataaaagatcaaaacaggattttagacatgaaatatatagtaactaaaatggaaaactcagtatattagtgtagttgcagattatagagagctgcaggaacagttagtgaattggaacatagatctgatgagctattacccagcaagcaataggaaagataggaagatagaaattattaaaaagaactctatgtaaattgagcccaacttatatgtaggagtttcaggagtggataaagagaatgggaggcaatcttaagagagaattgctgagaatttttctgattttgatgataggaatggattcttcaattcaggaacaaattattcttgagcaggaaaatatctacacctacatacagcatagtggaaccatagataaactaatcttaaatactgccaggtagactgggcatgatggctcacgcctgtaatcctagtggaggtcaaggtaggaggatcacttgagaccaggagtttgagaccagccggggcaacagtgagactgcgtctccacaaacaacaacaacaacaaaactaacaacaacaacaaaaaactaaccaggcaacaacaagaaaaaaaacttaccaggtgtggtgtgtacatgtagtcctggctactcagaagtcgaaggcgagagtatcccttgaccttagctaagggcttcagggcagtagtgagctatgattgtgccactgcactccagcttgggcaatagagcgagaccctgtctctaaaaaagaaaacaacctgctggggagaaaaaatacattacgtgtaaaggattaacaattaggccaacatcagacttttcagttgccacaacagtagtgagaatatggtagcgtaaaatcttcaaagtttagtgaaaaacattggcaactcagaattctgtaccaagctgaactctcatcattcttcagtaaagatagaagaaagacttttactttcagattaatacaaatgagagtttactacccaggatccctatggaaacaactgttaaaagatgtatgttagaaagaagaaaagaatgagatgcaagaaaaaaaaacaggagatgaaaaggcattaatgtaacaggagaaactaatctaatatcaatataatagtatggcatagaccttacagtaatagtgccgttacagccaaaactcgcaaatcaattgaggtttattcagtaaaggtgaggaatttcagagaaagatcacaaaaggaagagcttgtctgttgcttctccttgttggtataatgttgctaaataatacagcaggtggaattctgcatctagattgtttctatcttccctgtcaagagcataggaatgaaataaatggaatatatatttctacagtggcaaaatgaaaatgaagctcaaggtgtgtgaagacagaaattgtaagaaagcgtaaagacctctgcaatggccaggcagagtgactcatgcctataattccagcactttggaaggccgagacaggaggatcacttgagcccaggagggttttcacatagagaaagctataaggaattctccctttctgtgagggttttcacatagagttataaggctttgttgatcttagttctgataccagaacgaggaagtgttatgttatgtgttggcttaaggggtcaaagtaggttggctgactgccatgctttatcaggtttgcagaggccaagagttccttggggctgcatacctgaatagcacttattgcagtatactttgtgtagccaatactgtgtcttctttgtctgctatgagttttcaagggaaaatgagtgaaggtatcaacattaatttttcagaatataaatttgcgaaacgtatagtctttttttttttttaaactatgtactgtggaatgactcatttctaccttgactattttgatatctgagcttttcatctttttgtcaagtatggggtatcaaacagagcacaattgcagtttgttgaaacagtactctaaaacagtttacttccgtgtggtctgtaatgctgtcagtcccatggctcagtgcccttcacgtagcattcagcctcccatctaggtgggaacaatgggaaatgcagtcataggatatatcatttagagtggacttgagcaagttacttaattagtttgggccttgatttttctcagctttaaagttgggagtttaaattcagttatttaactgttaaaaaaatttatgaagtactgtggaatacaggaaaattgtagaaaatataatagataccagtcagatttaacatacattaaaataaagaattcttaaaaatgtctcattctaaactaatcaatggaagatgtggtttaaataaaagttattagaattttaggtttttagaactagttggggccaggaataaagatttggaagctgtggaggtggtggtgaaagccttagaattggattagtttctccagaggaggttccatgcagtgagatgtgaggaggaggaaatgacagaggatggagaacactgaaaaggtgtgatcacagagttagaaaggaaaagtgtcatgttggcaaagccaagaggggaatgataggaaacaagccacatatccatgcaactaattattactactaatttgcctttagatagatctgtttattgatttaaaacaaaggaaagttaaggtacgttgagagaattggttttttttaattgaggcagagtctctctctgtcacccaggctggagtgcagtggcacaatcttggcacactgcaagctccacctcccgggttcgcaccattctcctgccttagcctcccgagtagctgggattacaggtgcccaccaccacacccagctaatttttttgtattttttttagtagagatggggtttcaccctgttagccaggatggtctcgatctcctgaccttgtgatccgcccccttggcctcccaaagtgctgggattacaggtgtgagccaccgcgcccagccagaattaattgttttttgatcagaagtgagaggccaaaacagtagggtagccattttctgttcacttccattggtagagaaaaccttgtagacaaaagccttctgtttttattgaagttggcatgacctgtttgctacagacaaacttggcaagttgggcgaatgctgttcctgcagctctgctggtgtgaataaacaaggttttattcctcctgccaggactggtgtcagggcaatgactgtgtgtgtcctgctggtctttgaggggttttcctgaatatgttttttgtggtttgtaaaatatggacctcacgcaaaattatactacaaatttagttcactccaaaccaaaagatcagtgtagaattcagagcaattaatctggtagtagcaaagtggtttttgtggtggtttttatctcaaatctccagactagcatatttgaattctgtactgcacaaaaaagcagactaagacaaagtgtacacaggtgatgtgaattgaatacttagtcaataaaagatcatttaataattaggggtatggacgggcagtttctgttcctaatatttattatatgaaatattttttgtatcaaagcctgtgtttccagccacacttatactaaaggtttgtatgtttataacaagagttcttattctttcccttttcagtcacctttttcggtcaccaattcatacttgacactctctcagtgccgtgcgggtatttatgtccggtcagcattgacatgtttccaggtcacttaactgaatcatggatccaatataaagtgcagcttgggcatctgggtgcctttcataaagaggcagcaatgtggggtctcacaaatgttgtcctgtgtgatggtggtgccatcagaatgaaaaacacttagaagtgatgagggatgtgttcctacatacagatccatgtcccgcagatggaaaggcttttttctgaaattaatgcttagaagaactgagagacaagaaaattaggcagttgagacttcaggtttgaatgcctaagctttttgcctttgtagtaagaatttgtgtatttaggacatacaggataaaataatgtgggtttttttttttttaattgagacggagtttcgctcttgtcacccaggctggagtgcagtggcacaatcttggctcactgcaacctccgcctcctaggttcaagtgattctcctgcttcagcctcccgagtagctgggattacaggcatgcaccaccacgcctgactaatttttctgtatttttagtagagacgggatttcacattgttggccaggctggtcttgaactcctcacctcaagtgatccacccacctcggcctcccaaagtgctgggattacaggtgtgagccaccacacctggccggtttttttttgtttgtttgtttttaatgaggtgctttgttttttgcttttggttagaggtagtggtagattaatatatagtatacaaaatacagattagcatgtagtaattagatgcaaatgattatgtgatttatttatttttcaaatttctgacatgtatacttttctaaggctttgacctccttaactgtgtagaagggtcaccagattcagtaagcaccttcgccatgactgatgccttgtaatgggttcagctaataggaaccaaacctgacactgtcaaataggattagtagcaacactggctggcttgagctgtgcctgaatgccagtggataagggtcagtgggttctttggcatcttgagcagcctggttgttgaatttcatattccactaaggtctttactctgtggttgcaatccttttcttttaactgaatcaatattcagtctgttctgacacttcccttttggacctttttttgtttgcatggcggagtgttgtgatttttactctcttggcaaatttcaggtatataatacagcattattaattacacgctgctgtatattagatccccagaacttactcgttttataactgagggtttgtaccctttgatcagcatctccccatgcctctccctgttcctatccccagcccctggtaaccaccattctcttctctgtttctttgagttcaactttattcagattccatatgtaagtgagatcataccgtaatctgtgttatttctgatctcagttttcactgaatgctttttgtccttgtattatgagttgtgtttttctgcttctttgcttgtctggtgagtttgggttggatgccaagcattgtgagttttaccttgttgggtgctaggcattttgtattcctgtaaatattactgaactttgttttgtgatgctggtaaaatacttggaaatagtttcattcttttgggtctttcatttaagctttgttagatggtaccaaaattgcatttattctaaagctagtctcctcgtgcaccccctcccccttgattatattaaagagatttgcaaaaatttaaaacaattatattcttcttactattttagggggaaaatacaggtttttgaaattaaaatgttactttgattaacataatgggtttattgttatttaaaagctgttctaattttttttttttttttaaagatacagtgtcttgctttgctaccaaggctggagtacagtggtgtgatcatagctcactgcagccttgaactcctgggctcaagcgatcttcctgcttcagccccctgagtagctagaactataggtgtgtgccaccacacttggctaattaaaaaaaatttttttttgtagagatagtgtcttgctatgttgcccagggaggtcttgaacttttggcctcaagtgatccttctgcctcagcctcccaaagtgttgggattacaggtgtgagccaccgcacctggccctaattttgagtgtagcaaatattgatagatataactcacataaataaaaactcaataattgggggtcctcagtaactttttttttttttttttgagacatagttttgctcttgttgcccaggctggagtgcaatggcgtgatctcagctcactgcaacctccgcctcccgggttcaagtgattctcctgcctcagcctcctgagtagctgggattacaggcatgcgctaccatgcctgactaattttgtatttttagtagagacaaggtttctccctgttggtcaggctggtcttgaactcccgacctctggtgatctggccaccttggtcttccaaagtgctgggattacaggcctaagccactgtgccctgccggtcctcagtaatctttaagagtgctgaggagtcctgagaccaaagggtctgagaatggtaatggaagggaacattcagaacatttgggtgcctgaggcttctctagagcagggtacttgcccaaagggggcttgggattttgcttcctgttccaacctaacctttgtgttgccctgatatcttattttctgttactggaggcatcttccaaactcagttctccaggtcacggaaacaagtcaatgaaaaagcaggacaggtgtcacttctgttataagcttaccacttcgggcttctagtctctgttttcaacattttagtgatgttgtctctttctctatgtgtacacttctgtatatgcttatatgcatgctgatctatgaatttgaaaagaagtttgttgtgctttacctagcatttctgggtgttttgtagcagtaggtgtggtgggctgaatagtatcctccataaatctgtgtctacctggtactcagaatgtgaccatatttggaaatagggtctttgaagctattattagttaaggtttgagataagatcatgatggagtgggctctaaatgcaatgactggagtccttatagaagagagaggacatataaagatacaaagaagagggtgaagtgaaggtggaaacagagattggagtgatgcatcgtctacaagacgaggagccaggagacagcaagaggcaaggaaggctctttctcagagccctcatagagagcaaggtcctgctacacctttatgtcagacttctaaactccagaacttggagagaggaaaataaatctattgtttaaagccacctggtttgtggtcctttgttagggcagtcctaagagagtaaaacagttaggtttttctggatttctagctcatattcaggtcattatcaggtattttcaggtttttatcaaagcatttcaggtattatcagggagactgttaagatataatgtcatgtcagaaataacacaccaaaaataaggttcttattctctctcgaagctaaaacccatttagtcttcttcatcagaaacctgggaacccatgtttgacttatctctcttttatcccttatatacaaccaataaaagtcaagctcctagacatgacactgatgctttccgtggctaaggccttgtcttctgctgcacctcacataacttaccacctattctatgctttagcaattctctattcatagctctctgagaagttaacatcctttctaatcttcattatttgtggtatctctgctcaaaggttcttccattatcttcctcaccagccatcttctgctcatctttacatgctttgaggtatctccaagcaatctgagtgcttcttttctgtacttttagaaaatattctctacacttctgttgcagcactttctataatatatttatgtgatctattttggcaacattcttctccattaggttgtaacttcagcagaagacaggaaatatcttagttatctttgtgtctccagtaaccagcccagtgtaacttttccgatatacaaataccatgactttctcctgcttaaaaatcttcactgacttccatttgcaagtaggataaaatttaagcctcttattttagcaggcaaggatttatgatctactatcttttcaggcttgtctcttgtccttcttctgttactttatgccaagcaataccaaatgaatttacaagtatatcatgctgtttcatgtttctagattttaaagtattctatttcctcttcctagatatccatgcatttctctctgccttcccttttgtatctagtgatgttctcttcattattcaaaaaccaattcagacatttattcttttagaaaacttttctgactcttctgacatactgttcataggagagatttccctgcctgcctgtgttcacctgtgttcctttatgctggtattctttggtatgtgataacagattataatctttgatgtcatatctagtctttgagttccagtccttctactcaccagttcttttttctttttctttttctttctttttttcttttctttttttttttttttttgagacagagtctcactctgttggcaggctggagtgcagtggcaccatctcggctcgctgcaacctccgaatccctggttcaagcaattctcctgcctcagcctcccgagtagctgggattataggcaagcgccaccacgccaagctaatttttgtatttttagtagagatggggtttcaccatgttggccaggatggtctctatctcctgaccttgtgatctgcccatcctggcctcccaaagtgctgggattacaggtgtgagccaccacgcccggccatagtccttctacttaccagttctttaatataatatgaggtaaactatttaactacgctgagtcacagttttatcatcttttaaaatagggagataatgttagctactttacagtgctaaatgttttaagtgagataggattactgaggataaaagggtgggcaaaataggggccaggagcggtggctcacgcctgtaaccccagcactttgggaggccgaggcaggcagatcacctgaggtcaggagttcgagaccagcctggccaacatggcgaaaccccgtctctactaaaaatacaaaaaaaattagctgggcatggtggcatgcacctgtaatcccagctaccagggaggctgaggcaggagaatctcttgaacccaggaggcagaggttacagtgagccgagattgcgccactgcactccagcctgggcgacagagcaagactgtctcaaaaaaacaaaaaatatatataatttataatatgttacatattatgtatattatttatatgtattatataatacatattatataatatataatatatttatataaattagatataatattatcatatatagtatatataatatatattaatatataaatgtgtaaatgtatatattatataattatatataaaatacaattatatataattatatattgttttatattatatataatatataatccatattataatataattatatttaatacatattatatataatataattatatttatttacataatatatataattgtatataatatatatcatatataattatatatgatatatattatataatatatatcatgtataatataattacaatatatgatatatattatataatataattacaatatatgatatatattatataatatatgttgtatataatacatatgttgtatataatatatgttatataatatataatatatgttatatgtaagttgtatataatatgtaatacataatatatgttatatataatatatatagaaatattggtaagttctgtataatgatgttattaagttctataagtagaaaaaaaagtgttaaattctattacaaaataccctgagaaaggatgagggagatagtatttgtctgttgggggtttggaaaatatttattaaaatggtggcataggaaaaggaccttgaaagatgtgttcagtaggcagattttttttaagtggtagagggttaaggatattacaggcataggacaaaatgtgaacaatgacaagaaagaaggaaagtatagtatttattcagagaatggcagtactgctgcaatggagagccactggaagtggggcaaggaggcatatggcaaaggttaggcagtgctggtacattgggaccgtctgaccatggaggaccttgaattccctgctgtgatcctgtgggttagggtggtgttagagaattagtggttaagagtgtggggtctggaggcaagaccacgtaatcttagatctctgcttatttgtagctgtgagatcttgggcctgctatctcctctgaggcccagtttcccacattgccgtgagagagtgtgaagtttcctgcagggagaatgcaagggaagaaaatacgatacctgagaacagaagtgtgaggattttaatgtatatacagtagtcctcccttaactgcttttttgctttccttggtttctgttacctgtggtcacctgtggtctgaaaatattaaatggaaaattccagaaaagaacagctcccagattttaagttaagcttttttttaggtagtgtgatgaaatcttatgccattctgctgtattccaccctggaggtgaatcttccttctgtccagtgtatccacgtacccacactacctgccccttagtcactagtagctgtctcgttattagatcgactgttgcagtgtcagtgcttgtgttcacataacccttattttatttaataatggccccaaagcataagagtaatgatgctggcatattgttacaattgttctattttgttactagttattgttgttaatctcttactgtgactaatttgtaaattaaatgttattatgtaataggtatgtatatagaggaaaagcatagtgtgtatagggtttgatactgtctgtggtttcaggcatccactgggggtcttggattatattcttcgacgacaaggggggattactgtatatggtgacaaaaatatacatgaacacatgcaggaaggcccagaaaactgtttaattcagaaataaagtagtaaagtaaaacaggtatgatttttttttttttgaggagttgatatgagactgaaatcattgcttaagctgggaggaaaacaaaacaaaacaaaaaccagaatagagacgaatgataaaaaaagaaggacgatagatcagaggtcatgctatggacaaagggtagatttagtaggtgtaggaggaagaaaagaacagtatttgtgattcagaaaaaaaaatttagagtttgaaagttctcaggtagatctttccagattataattaggttaactatgtatattaaagtagaatagaggtaaattacagatgaaagactcttgaaggagcatggtagaacttgtggtgaataatgacaaatgggagctcaaatgattattccctactttctggcttggtgagactggtcgcgtagaagtagttggtagaaatgtagtttagcagagtgaactatggtttatctacatgtttttcctttccagtatggtccaacataatttgtaagtacttacagtagtagcaagtacttattatagcagtctccaatgagactagtcttgttaagaaattttccatactacttaactgagcaggaagtaccaccgcacacacagtattgcttctcagataccttgtagtttagatacactacacattggatatcccttacctaaaatgcacgggactagaagtgtttcagagtttgagtttgggaatatttgcattatacttatgcttactggttgagcattcctaatccgaaaatccaaaatgttccattgagcatttcctttaagtgtcgtgtcagtgctcaaaaagttctggagtttggagcattttggattttggattttcagatttggggatggtcaacctgtattagatcttcctgagtgctttgatgtaccctaaatgtgaaacattattcatattttctttgtggtttaatccacgttcagataggaaaaataagacaagttaaagatgagagaccatagaaccatacttgatttcttagatttgcactgttcagtctggtagccaccagccatttgtggctattaagtacttgcaatgtggctagcccaaattgagatgtgatataaaggtgaaatatacattagatatcaaagagttagtatgaaaaaatataaaatagctcattaatagttttttatatgggttatatgtttgaaatgacaatgaaaaaagaatgtaaaaaagcttattaacaattttcggcttgaaaatatgacttattattttcctgttgaacagcactgaatctatgtgtggggtgctaaaagcttaataaaattttctctgaatggattttaaaataagtatcattagatttcttgttattttaaagttatatctaatgaaaggcattaaacttcagggataaaggtaactagttaccaaactttttagctggttagtcttgctgtctaaaaagtagacctttgcttttgctttgtatggatatctaagtgcattatggggttgtttttcataaaagcctcatagcctatgactagactgtattatctgatatagccagtgttatgcttggtgatgctttttttcccttttcctcattttagattttctaaagcaatgtagcttcacttggaaacttgttagaaatactgattttgaaccccaaccctgttgaatcagagactaagggcttgatttagccctccagatgattctgatgtgcatgaagtttgagaaacatagttgtagagattccattgtgtaacggtgagcacactggactctgaatccagagaaacatagatgtagataatactacttttatagaataacaaaactcaacctctttataacctttataacatatctatttgaaaggaattacattcttttctttttaattcatcacttgtaaaactcctacattcttaggtggatgctctccgattgcgtttggaagagaaggaaaccatgttgaataaaaagacaaaacaaattcaggatatggctgaagagaaggggacacaagctggagagatacatgacctcaaggacatgttggatgtgaaggagcggaaggttaatgttcttcagaagaaggtaaggtacaggtgtttcgagttcagtggcccattcctcatacatcttcactcctaccactaagttatttctaaatgctgtcagagtttcttgctcatttttcagtttatatttttgtgattagtaatttggaactcttgttgcggtaggtagattgttaagactgctctatatattcagtttttaaaaatttaaacactgttagtatcttccagtagtgcttttcatgctgtttctcaaaagtgccttgtaaattgccaaagtgtttgaactgacattcttttgccccttctgtcttttattgaaactgtaccaaattggtttagtacatggacttgggatggtacaacttcatttatgtgtttaataagatgacaattttaagccgagaccagtagcatccagaccaacacataattcatatatgagcaaaaaaaatgtgtgtgtgtctatttcaatacaaatcttactgttccttagtgcttgttatttccccttttttcagttaatatattttggtattctttccaagggtttcttcattgttgttactaacagcattgtatggatatactatagcaaaatttctactgatggacattaattttgctaaaaatttcttcctttacataaaatgattaatagtaaaaaatgttgtacatgtttagtttatacatatgtcaagtcaagtatatttctaggataaagtccttaaagttgaactgctgagtgaaaggatgtgcatttataattttgatggattttgccaagtaaccttaaagagactgtaccaagtttcatttctactatccgtgatgaaagtgttatattcccacatacttgtctgcagagtgtgttaataggctttttcactttttggcaatctgataggtgagcaaacaatgtcagtgtagttggagttctttcattgtaagtaaagtcgaacagacttttatatttaacatcctttgtattttctattatttgtttatatgctttacccatttttgttttgagttctttcctgcttttttaaaagttgatttgtagaaatctcttcccaatttaaaaattagttcttttgtccgatgtgagttctaaacatttcttcttgtttggcttatttattgagatggagtctcactttgtcgcccagactggagtgcagaggcacgatctcggctcagtgcaacctctgcctcctgggttcgagtgattcccctgtctcagcctcccaagtagctgggactacaggtgcctgcccccacatctggttaattttttgtatttttagtagaaacggggttttaccaccatgttggccaggccggttttgaagtccatggcctcaagcgagccacccacctgggcctcccgaagtactgggattacaggcgtgagccactgcaccagcccaccttttttaaaaaataaaaataaaaaagatgttgtccaggctggtctcaaactcctggccctaagccatcttcccatctcagcctcccaaggccactgctcctagctctgtttggcttttgactcgtgtgtgtgtgtgtgtgtgtgtgtgtgtgtgtgtgtgtgtgtgtgtgtgtgttcagacttcttaaataaagtgaatgttttaaggcttctggattttgtgacatattacaaaagttgtattttagaatatttcttattttctagtgatattgatctgtctgtatccagtaacattgtttaaatttttgtgtttttgtgatatatgttaatagctaattccttctaaggtacgtttctttttcagaagtgccctagcttttttttttttcttggctatttttccatttgaaatttagaatcagcttttatcatctcctgcctttaattctttctgttgcattttttattgggagtacataaaatttgtagttattaatttatagagaattgacaagaatggggtatatctttccatgaattcattttttgtttctcagaaatgttttaatgtttccttcataatagattttatacatttattaagcttcttcctaggttttctttttgttataaagtgttatatttttcattacatcttctaactgcttgttttttttgtgcacatgaaggcttgtgatttctctatatcagttttgtacttagtcatcatactgaattctcttaaaggtttggatttttttttagtttattcttttggcttttccaaatatgtagtgttatcatttctaaataataattatcttcctgtgttcagttttaatgtatgtgccccatttccttctccttctacttctgtgtaccacactacatgatactggacatctccacattatacctgatctgaatgagaatgcttttagctctctcccactaaagtacagtgcttgcttttgtgttagaattgatagctacattaagaaagtatccatctaaataaagtgaattaaaacttaaacttttttttattattttttgtttcagtagtttttggagaacaggtggtgtttggtgacatggataagttcttgagaggtggtttttgagatgttggtgcacccatcacctgaacagtggacactgtacccaatgtgtagtctttttatccctcacccattcccacttccccttgactccccaaagttcactgtatctttcttatgcctttgcatcctcatagcttagctcccacttgtaagtgagaacatgcaatgtttggttttccattcctgagttacttcacttagaataatggtctccaactccatccagcttgttgcgaatgccattatttcgttcctttttatggctgagtagaattttgtggtatatatatatatatatatacgtgtatatatatacgtatatatatatatacacaccacattttctttatccacttgttgattggtgggcatttgggctggttccatattttttggaattgcgaatgtgctattataaacatgcctgtgcaagtgtctttttcgtataatgccttcctttcctctgggtagataccagtagtgggattgctggatcaaatggtaggtccacttttagttaaggaatctctatactgttttccacagtggttgtgctagtttgcattcccaccagcagtgtaaaaatgttcccttttcaccacatccatgcaaatatctatttttttatttttaaattatatcgcattgtggttttgatttgcatttcactgataattagtgatgcagagctttttttttttgagatggaatcttgttctgccgcccaggctggagtgaagtggtgcaatctcggctcactgcaacctccgtctcccgggttcaagcaattctcctacctcagcctcctgagtagctgggattacgggtgctcgccaccacgccccactaatttttgcatttttagtcgagacggggtttcaccatgttggccaggctggtcttgaactcctgatctcaggtgatccacccgcctcggcctcccaaagtgctgggattacaggtgtgagccaccgcacccagcccttgttgagctttagtatgtttgttggccatttgtatatcttcttttgagaactgtctattcttttgagaattgtctattcatgtccttagcccactttttgatgggattatttgttttttacttgatgatttgaattctttgtagattctggatattagtcctttgtcagttgcatagtttgtgaatattttctccaattctgtaggttgtctgtttactcttctgactatttcttttgctgtgcagaaactttttagtttaattaagtctcatctatttatctttttgttgcatttgcttttgggttcttgttcatgaagtctttgcctaagctgacatctagaagagtttttccagtgttatcttctagaatttttatggtttcaagtcttagatttaagtctttgagccatcttgagttgatttttgtataaggtgagagatgaagatccggtttcatttttcacatgtggcttgccagttatcccagcaccatttgttgaatagggtgtcatttccctgctttatgtttttgtttactttgtcaaagatcagttggcagtaagtgtctggcttcatttctgggttctctattctgttccattggtctgtgtgcctgtttttataccagtaccatgattggttttggcgactatagccttgtatagtttgaagttgagtaatgtgatgcctccacatttgttcttattgcttagtcttgccttggctatgcaggctcttttttggttccatatgaattttaggattgttttttctagttctgtgaagaatgatgatggtattttgatggcaatttcattgagtgtgtagattgcttttggcagtgtggtaattttcacaatattgattctacccatccatgagcatgggatgtgtttccatttgtttgtgtcatctgtgatttctttcagcagttttgtagttttccttgtagaggtctttcatttccttgtttaggtattttactggtttttttttttttttttttttttttgcagttattgtaaaaggggttgagttcttgatttgattctcagcttggtaactattgatgtgtagtagtgctgctgatttgtgtacattaattttgtatcctgaaactttactgaattcatttatcagatctaggagcttttggatgagtctttagggctttgtagttatatgaccttatcatcagcaaacaatgatagtttgacttcctctttactgatttggatgtccgtgatttctttctcctgtttgattgctctgacaaggacttccagtactgttttttttttttttaaattttattattatactgtaagttctagggtacatgtgcacaatgtgcaggtttgttacatacgtatgcatgtgccatgttggtgtgctgcacccattaactcgtcatttagcattaggtatatctcctaatgctatccctcccccaacccccaccccacaacagtccccggagtgtgatgttccccttcctgtgtccatatgttctcattgttgaattcccacctatgagtgagaacatgcagtgtttggttttttgtccttgtgatagtttgctgacaatgatggtttccagtttcatccatgtccttacaaaggacacaaactcatcattttttatggctgcatagtattccatggtgtatatgtgccacattttcttaatccagtctatcgttgttggacatttgggttgattccaagtctttgctattgtgaatagtgccgcaataaacatacgtgtgcatgtgtctttacagcagcatgatttataatgctttgggtatatacccagtaatgggatggctgggtctgttgaatagaagtggtgaaagtgggcatccttatcttgttccagttctcaggggaaatgctttcaactttcccccgttcagcataatgttggctgtggctttgtcatagatggcttaaggtatgtcccttgtatgccaattttgctgagggttttaatcataaagggatgctggattttgttaactgcttttttggggtctattgagatgatcatctgatttttattttattttattggtattagttttgatctttcaatagtaatattttcaagtaatagacttaatagtttcaaaacatttttcacttctcatgcacttgatcattgtatatttttctcccattgtgcttctcatacatttacttcttattaggcacaataacatgttggtaagaaatatgaccagacaacttttagtggattagaagttacttgtaatttttactatgattaataatgcgtaagccttttgattccatttcctattaaacttttctttaagtgtaggatattattagtaaaatacgaatttttaaaatttcgctggttattgcagttgtggagtttgtgaggaggggagtgatttaattatttgatttcatacagtgcaagtttctgaaggcatctggatgcacaaagactcgattcaccactgtgccagcagcctgtttgttgctctaggctgattatacccaaaatgttggtgacatgatggattatcactttcattaggtcataagtgttaggggcatatattttacttttataacatttgtttttcagctcctattttctttgctctcattctataaggattacttcatttaaaaccaaagtgttgaaagattgcgtgggtcttcagtcattaaactttgcctttcagatcatgagaacatgacagcaagctactaaaaaagccttagatgattaatgttactggaagaaaagatatactggttagaattcaaaggttgtttggaagtaacgcattgcttatttttaactaggtaaaaatttttagaaaagtttttgtattagtccattttcacactgctataaagatactacctgagactaagtaatttatgaagaaaagaggtttaattgactcacatttccatatctgagtcgctagggaggctttgggaatcttataatcatggcagaaggtgaaggggaagcaaggcacgtcttacatggcaacaggagagagacagacacacacacacacatatcatgcaaatcttgtatattttttctttgtccttcctcttcatccttcacagaaggcagcagaggatcagtaattgtgctgtcttagtacaccacactgccccagtaattcatcatgttacaaacttttatgtgtcttaaaacttaccagatagtacaactgttttcaaaattggtttatgttattagtgcttcttttttattttatttaattaattattttttgagactgagtctcactctgttacccaggccggagtgcagtggcgtgatattggctccctgcaacctccgcctcccgggttcaagtgattctcctgcctcagcctcctgagcagctgggattacaggcacctgccacctcgcccagctaatttttgtatttttagtagagacgggatttcgccatgttggtcaggctggtctcaaacttctgacctcagatgatcctcccgcctcggcctcccaaagtgcagggatcacaggcatgagccaccaagtttggcctagtactgctttgtagacaattacctttatgcctgttattttcagtgcttagatccttcccattctgtgtactttttttgttgacgttactgtattaaggtggtcagaatcaacatttgtgatgtatttccagcaccattgttggctgataaaatagagatagctttaaatttagtatccataaaaaataaaatgaataccgtaggtttagagaagtttaaagttctcaagggatctatgtattttttaaaaattatataaaaataactttaaagtaatctttttttcttggtaaaacgtgcagttttatgtatttttaggcaggagtaacaactttttccacatttccatccagagaacaaaggtcaaaacagcatttattattctagctatagttttactgtttaaacttttgaaattttgtgtagcaccattgagagaagattagtgcttacagctgaaacttagttttaatacagtatcatatatacatatatattggttgatttgtttttgagacagggtctcactgtgttgcccaggctggaatgcagtggtgcaattatggctcactgcaacccttgtgtctggagctcaagcagtcctcctacctcacttcttgagtagctgggactacagacacatgccaccatgcccagctaattttttgtattttttgtagagatggggtttcaccatgttggccaggctggtctcgaactcctggactgaagtgatctgcccacctcggcctcccaaagtgctacgattacaggcatgagccaccatgccagacatctttttttcattttttgttatcatttatttctgaaactcagccaatatgatgtatagagacaaatacatagatattgactggcaaaaagtcatggagataaagtgtattacttgaacaagacttcagattgaatattattattctttagttttcattcatttgcccgctttgtgaggtattaggaatgacatgggtggtggtggatacaacatagaaaaatttcacttgcttaatattacttgaactaatctctgggaccatagtcccttggccatcaccaagactgagaagaatcgaatcaagattttgctttaggggaaggttgttttgaatatcttagggggatttacagtgcactctcctgtagcttacattgcaaagcattctggcatgggataagatgttcataactctgtgtgttgtctttaaacagagtctttgaagcagttccctcagacagcacaggacattttcctactgaaggaactcagatgcagtttaggcatacttatatgtggaaactatccatctcatagtttactactgaaccctgaattagctggtagcaacaaccccctaccctctctcccgcagtcagaggcttctcctgatagccatggcagtaaaaatagaacagtagaactaaaatattttccagaagcagaacatattcatagggaaaggatgaattcaaagttatttacaactcttttatcttcaaaccattacatataaattgatcaaataaaaatagctagtctaatgtgttttgagcaggtattaccatttttatttattatttatattgcttatttttgaatcatgatatttcaggctttttatttgatgagtcaacatcttaagattcctaatgagaatggaatatgaaaaataattgggtcattgttaacaatgataagtcattttgacagtatgtgtacttgatatgatcaatgatacttcagctctgtggttctcttccccaaaatgcacaaccccagtccaattatgaacaaaacagtagacaaatcctagttaagaaacattccaccaaacaactgactagtagtattcaaaactgccaagcctccaaaaactaggaaagtccaagaaactgtcacagccaagaagagccaaggagacatgccatccaaacgtaatgacatatcccaggcaatatcttggaacagaaaaatggcagcagacagaaactaaggaaatgcgaataaagcacggactcttgttaagaataatgtatccgtgttgattaattatgacaaatgtgtcatactaatgtaagatgttaacagtgtgaaatctggcctctgggttcccaggaactctctgtatcaccttctctgtaccatcctcacctctctgcaaatccaaaactattctaaacaaaaagtgcatttaaaaaatcaattcaaatttggcagtgtattagggttaagaataataaagtaacagtgattttgagagagctcaaaaataaaaaatttggaatggcattcttttcaaagcttggtggacccaaaacctataaatacttcagtgggggagatcagggattttaccttcggaacattaaggttgtatgaatttattggggaagagggaaggctacaaagtagtcaacctaattctatttgtcttctttgcccctggcttccagatctctctccaagtcaccatagaccatgtgcaccccaatattgaatatctcatgaacaaccaggacagatttgatctaagaaagactcaatgcaagaaatccctgttatattccagtggagagtgttatgtggaatggacccctccatttgaactcttaaattctgtttcaattcaggtcattattctcctctgctttccttggaggtttatacaaatcttaggtacaccaggaaaccatcctttgagccagggttctttctcagtgccaggcacttttctatgtgaattatatcaacaggtaaccctgtgaaccatgtttctacctaacgctgttgacaaatttcagtcctgtttcatttcacacaactgcccaacttggtggatcagaagacaacaggtaaagataaccaagtagccaccaagtaagactaggaggctttccgcaaaaaagacaactttctgaaatgcttggtgaaactgttcattagacagaatgtacatcactggattgatgatggagtttaaaaatagctcagcaaggctgggcgcggtggcccacgcctgtaatcccagcactttgggagaccgaggcaggtggatcacgtgaggtcaggagttcgagaccagcgtggccaacatggtgaaaccctgtctctactgaaaatacaaaaaattagctgggagtagtggcaggtgcctgtaatcccagctactcgggaggctgaggcaggagaattgcttgaacctgggaggcggaggttgcagtgagctgagattgtaccattgcattctagcctgggagacaagagtgagacttggtatcaaaaagaaaaaaaaaaaaaagctcagcaagatgaagatgtcttaatatggtggtatcttggctggcagagaaacaataaagagaggcagccagcagatgataaaagcccctaaaatgatccccagggtttctgtggctttccttgtttgaaagtaaatttcctgttgtactaggacactataagcatgcttgattttcatgtgattaacaagcagaggagagccagttaagcgcctttgcctctcatggaggctggggttgaggaagaagagtgagctgtgatgacctgggcagtggtgctgtgatgatggcttctggatgttcttgttgggcaatgtgtgaagatgatgaacaacacaaccaaaatgtagaaggtcttacatgtggagtaggtggtgcaagaggtctaggagaagagcactgggatagagatacaatttgagatggcccatttactatactacagggcattggtgatggcccagtacctggtcagagcaacagacagaaatatcggttggaggccatgtagcacgtgatgctagaagacagccagatgttgcacaggagttggccaaatttccaggtgtgtgtgatggtctatgtgatgctcatggatatgaacaaggagccagtgagatagttggctggtgtatatagcttcctggtgaggaagatggtggtaagcagaaaggtgttggagagagctgttgtcagtgcgatgatggaaaggaccacagcaagagatctctagcccctggaagttcccagctcctaagcctccggtatttttgtagtatcgagggatccgttggaggcctcctggaggatgtcttccattggatggttttgtgaggacattctagggagctttctcttccacagtcatagcttctcttttcacagttgtctgtaaaaggtcatctttccatttcctacttctgggaaccgtacatcagaagagcaaaccacaacagaaaatctccaaggcttgattacatgaagaacactgaggtgactcctagctacagttaaaggcttttcccaaatcagattaatcccaagatgtctctctgttctagaactctgataggcacatgctgaatatgttagacaattgcaggttatcacagcactgtgggcaaagctccacaatttcttgcctttggtattttgactctttttaaggcttgagacttatacgtgtttaactgtgccttcagaatatttcccatcctattccaaagagattgtggatttcaggttgctgcctgggagcttttaaaattagagacaaaagggaataccagcttattcagagaagcagtccagtcaacagctcacagttttcctaggtgaatcctgacatatgattggtacttaattttggttccttttctactgactgtttttgagcctgaaaagacaaacattccagttaccaaagcttgaagaatgcatgaactcggagaagggaaaacaaacggatcactgtgagtttgccaagcggggcaggtgttcgaagcccctccctggccgtgcgtgtggaatgctgggcttgccctcctgggccctcctttcttcacatggtcggattttggcctacataatcacaggccccagccctgcgccttcccctggccctttcccttcctgcacttttgggatactccatttctttttttgttaattaataactttattcgtttggagtagtttgggaagttcccaagtgtacctgaataatgtacattgtattcaataggtaatttttcatttctcccctgcctgcctccccctgctctgagtctctagtgtccgttataccactctgtatgcctttgggtactcagcactgcctccctcttatgagtgagaacatgcagtatttggttttccattcctgagttacttcacttaggatgatggcctccagttccatccaggttgctgcaaaagacatgatttcattctttttttcatggccgagtagtattccatggtgtgtgtgtgtatgtatatgtatatgtatatgtatatgtatatgtatatgtatatgtgtatatatacacatatacatgtatatatacacacacacgtgcatatatatgtgtgtgtgtatatatatatacacacatacccatgtgtgtttatacacacacacacacacacacacacacactttctgtctcttgccatatacaaaaattaacctaggtggattaaagacttaatctaagacccgaaaccataaaaattctggaagataacacagggaaaactcctctgaacattggctcaggcgaaggatttatgacaaggatctcaaaagcacaacaaaataaaaatgaataaatgggacttaatggacttaattaaactaaaaagcttctgtacagcaaaataaataatcaaaagagtaaatagaccacctacagaatgggagaaaatatttgcatcatattcaacaaaatattaatatccacagtctacaaggaacttaaatcaacaagaaaaaaaaataatcccataaaaaatgggcaaatagcatgaatagacatttctcaaaagaagatatacaaatgcccaaaaatgtatgaaaaaatgctcagcatcactaatcatcagggaaatgcaaattaaaatgacagtgagataccaccctaccccatccagaagggctattattaaaaagttaaaaaataatagctggtatcatggatgtggtgaaaagagaactcttacacactgttggagcaaacgtaaattagtacaacctttatggaaaactgtatggatatttttcaaagaactaaaagtacatttatcatttcaggctgggcgtagtggctcacacctgtagtcccagcacttagggaggccgaggcagatggatcacctgtggtcaggagttcaagacaaacctggcaacatggccaacgtggcgaaaccccatatctactaaaaataaaaaaatctgatgggcatattggtacgtgcctgtagtctcagctacttgggaggctgagacacgagaattgcttggacctgggaggcagaggttgcagtgagcctggatcgtgccactgcactcacagggcgagacttcatctcaaaaaaaaaaaaaaaaaaaaaaaagatttatcatttcatccagcagtcccactactaggagtctacccaaaggaaaagaagtcattctgaaaaaaaagacatctatgatatggaatcaacctaagtgcccatcaaccaatgaatggataaagaaaattaaactttccttttttttttttgagacggagtctcgctctgtcgcccaggctggattgcagtggcgccatctcggctcactgcaagctccacctccctgggttcacaccattctcctgcctcagcttcctgagtagctgggaccacaggcacgtgccaccacgcccggctaattttttgtatttttagtagagacggggtttcaccatgttaggtggtctcgatttcctgacctcgtgatctgcctgcctcagcctcccaaagtgctgggattacaggcgtgagccaccgcgccctgctgataagtatttttttaaaagccctgagaaatgacaatgtaggatttaaaaaatgacttgtattaacagtatgagagtaatatgtgttcaaggtaaaaaaaaaataaataaataaaaataaaaattaccaaaacatatggagtgaaattaaagttccttctcccatcctttgctcctctcagtgcagttctttagggttattaactgttgttaacagttctttgtgtgccgtttcataaagtttctatgcatatcaagcatttatgtgttatataccttttaaaaaacaactggaatcatactttttattaatttaaaaataaacattttaatatcatcttatatacagctttatctcatcttaaaaaatatctacatggttttctgaatcatacttctaccataatttaactaaatttaacctaagatttacaggtagatgaagataggggtttttcttattttattttatttattttatttttttgagacagagtctcactctgtcgcccaggctggagtgcagtggtgcaatcttagctcactacggcctctgcctcccaggttcaaacagttctctcctgcctcagccccctgagtagctgggattacaggcgcgcaccaccacacctggctaatttttgtattattagtagagaggattttaccatgttggccagcctggtctcgaactcctgacctcatgatctgttcacctcagcctcccaaagtgcagggattacatttgtgagccaccacgcctgacctcttgttgattatagtagtataacgcataatgacataaccgtctcattcatgagttgatattgtatgcgtgtaaaatgtcgatagctgtttaattatccaccaagagttttccactgatttacacggagaatgtttttttgcacagtttcattaaacatttgttatcaaacctttttaaatttccactgacttggtaggcaattctgaagtgtctcttttcttgcttagtatttatttaaagttgagttctcattgagcattttttcataggtttttgttttgttttaattgggaggtatatgttaatttcttttccatatttttctgtttgatgatgtattttttcttgttgatttataggaagtttttcctctagtaaatacattggtctatttccttttatgttttacaaatacattttcctgttttttgttttttgtttttaacttcatttatgtatttatttgggggtttatgtcaccaaatttaatagtacttttctttatgtcctctcagttttaggtcacactttgaaagtccttatacatgccaaagtcattttcatttttatatttttttgagaaaggctctcactcactctgtcacccaggctggagtgcagtgtctcagtctcagcccactgcaacctctacctcccaggctccaagccaaccttccacctcagactctcgagtagctgggctacagccgcacacaccaccatgtccagctaattttttagctttctgtagagacagggttttgccatgtggcccaggctggccttgaactgccgggctcaagcagtctgcccttgccaaggttattaaataattcatacatgcttttctctggtacttttaaagtttctttttatacatctaaaaattggtttataaaatttatatattgccgtaatgattcagttttatgtttttacatgtggctggccagttgtcattatagtatttgttaaataatccaccccttctcttctgatttgaaatgccacaaataaattatcagattagtagattgttttgctatattaattttatttttgcaggaatttctcactcttctcactcatttactttttcagatgaactttagtatgattttgtcaaattttcctcttccaaaaaatgaacttgttactttttttattgaatgtggtatctcagaagtcaagtgaagaaagggtttcaaagaggagaggatgatcagatttttcaaatactgctgatgagttacaaaaaatgaaaattgaccattggctttaataaagtgaagatccaaatatctaaaaaaccatcatgcagaagaaagattagacttgttcaatatggccccacattaactcaatcagcagatactctaaggagtcaattctaaagagagtcaaactgtccaaaactgataacacactacctgggaggaaatcaattcattcattataagtggacatatagcaaaattaaagtgtaatccgtcactttatctaattttgctatatgtccagtagagtgggcagagtttatagtttgtgcctagtttctcctgtgattatctgttactttaaacaatattttaaaactttctgtgtcttgatttaacacgtttaaaaatgaagccatgtttattgactactttttattaaaaatagtttatttatattaccaatcccccttcttgattttagttggtaaacttttgttatattttgctgagttcatagtacttttcagttttatattgtgttgttttttgtaaaggagaaacattgcttactgtaattatgattcatatttagcttttatttctgaatttcagtatatttaatgctcataactagtcgttaaaaacagcttaactgttcccagtttttttgttttatttattttttttttgagaaggagttttgctcttgttgcccaggctggagtgcagtggcatgatctcggctcaccgcaacctcgcctcctgggttcaagcgattctcctgcctcagcctcccaggtagctgggattacaggcatgcgccaccatgcccagctaatttttcttttctttttttttttttttttatagttttagtagagatggggtttctccatgttggtcaggctggtctcgaactcccgtcctcaggtgatttgcctgccttggcctcccaatgtcctgggattacaggtgtgagccaccgcgcctggctgttcccaagttttaaactttaatttttggttgcccaggaacttctttgaattgttttgtatgaagggttatgggtgctatcccaattccttgtttgttgaccatgtgtttatgttatctttttatattttaaaaaccatttcagagatacaaaaatgtatagagaataatatactgagtataatcactcaagttaagtaaacatttcaaatattgttgaagttcattggcatatctctccttgatagtactcctttttattctatcccagagattaatacttgattttagtatttatacatgttcaataagaggaagtacatatggcaaataaatatgagaaaaatgttcaactataatgaatgaattgatttcctctcaggtagcatgtatcagttttggacagttttgaccctattttgtttaaccagaattgattccttagagcctttggcaccagggaccaattttgtggaatacaatttttccacaggccatgctgcaggggacagttttgggatgaaactgtcccacgtcagatcatcaggcattaggatctcataagaaacatgccacctagatccctcgaatgcacacttgacagtaggattcacgctcttgtgagaatctaatgctgccactgatctgacaggaggtggagctcaggtggtcacgctcacttgtctcaccgcttacttcctgctgtgcggcccagttcctaacaggccacagaccggcactggtccatggcccaggagttggggacccctgccttagagtatttgctgattgagattaacttggggccatagtgaataagtcagatcttttttctgcatgatatttagatatttggagcttactctttggcagcccccaaatctcaatatcctacgtgaagtatttttattcccctcattgttcttatttgctttggttattttttctgatgacttttatgtgtctaaactgatttttcttccatcttgacttgtttagttaggattttggatctaattgcaagagagatgattaaaatgggattcatgttccgttcacggcccttagctgaaatgtgggctactcagtgaaactcactaacgttcagtttcttcatctgtagagtggatataatagctacttaaggatgttcttgtttaacgatgtaatgtgtatgaaatcatgcaccttggaacctgtaaagtggtatatactcaggatatgaggtatcaacataatttattctcattaaatttcattcagccaattactctgaatttagaatcatggagaatcttttgactcttgatttgattgtttagtctaacagtaatttagtctgacaagtcttgatttgactaacaaatcgtttagactaacaaattgtttagccttgatttgattgaaggattgtcaatccttcaatttcatgccttctacccatttataaacgtgctctgtatactttcgtatagacaataaaatgttgaacaagcccccaaaagatttaggtgatacattgtaagaaactgctgatcagattgatatatccatcacaacaattctaaaagctttttttgttgcctgtagaatttttttttgtaagctcactttgtttgcaggtccagacttttataaatctatattcctatttgtccttcatgtatgttcttcaataagacccttaaaaatctaagatcaaggtgagcatggtggcttacacctgtaatcccagcgttttgggaggctgaggagggtggatcacctgaggtcaggagcttgaccctgtctctactaaaaatacaaaaaattagctgggcgtggtggtgcccacctgtaatcccagctactggggaggctgaggctgtagaatttctggaacccaggaggtggaggttgcagttagctgagatcacaccactgcactccagcctgggcgaaagaacaagactctgccaaaaaaaaaatcaaatctaagatcagcctgtaaaattccttcttctttaaattttctttttctttttgtagagacaaggtctcactgtgttgcccaggctggtatccaaactcctggtcttaagcaatgctcctgccttggcctcccaaagtgctgagattacaggcatgagccactgtgcccagcctgaaattccttctaatgatgataccttgatagtgaaccacctcaggaccaccacctacacatattttcctagcgttctaagcaatgtatgcactggaatagtctttgctgtttcttcttctttttccttaatgagtacatttgtagttgtacagtcaaaattatgttcttgtgggtctcccagtcttcccagtctttctaaaccgtcctcattccgcatagtgttttccactatgtgctaggcaaagacatatagatgtggtctctgctctcaggagtcccagaattatgggaggttagaaggttatgatacgaatggtatacggtggggcaaaaaaacgaggaattttagatttagccctgtatgaaaggagtctgaggaagtcttaggagctgagtcttgaaagtttgcaaggtagatggagaagggggcatctaagcctggagagtggtgtcaataaaaacgaggaggggtgttcctttccaccgtgtcatgccctggcatttcacttctgcttttaaacattcgtaatatacgctcttaaaaatttctggtagagctctgcatatgaatgccgtttctgtctcattacgaactctgaaatcacttgctccctggcaaaattatacccaatttttacctaatgagaaaaattacagtgaatgtagtcatctttattgacctgttaatttaggaagcagttgagttgagtttttttctcctctgtcccagaagattttcaatcaaaaactgtagaaatttatcttcagtgggatattgtggtataacttttaaggtagaactttaggtatccctgtagagatgccttaattctgtacaaaaaagccttaaattctgtactttgcttcttgattcagacacttgttccctaaggaagaagaatatggtaacactacatttatccttttcttgttctttggtgtctacattctctaatcatttctttcatgaatattataactgtatatttaagtaatatttaaatattgtaatatttagggagcagtactgagaaactatgttattttggcatttatctagatatacttaaaagaaattttttcttctgagcacaatggcagttatggtaatcgctgggttataagttagtcacatactgtggactgtctctggttctgtctgggccaccactgtccacccatagtcttccttgctttctaagtagtatacatatttgtatgcactagggtaacccagtgcttagagaatgaaacgagacaatagcagatggccaagcgtgctgtacaatgggattagtattgggctcctccttcccagggttctcccctatggtttaaagtagttctgtgttacagtaaatttcttatctttataataaatcactgacctggaaaatgtaattgagcatttgaatctgagctgcattcaaaatctgtgttaaaattgtacagcttcttgcttgattgattataaatgataatgtagcttggagtttaatttgcttacacagatgctatcaacattcccttccatgcttctgtaacttctgtttatttcgttttgcttgcatctccagtttcctaggtttgttttttttttttgtcctagttggttctttaagtctcttctattttgttttgggtaggaggtcagaaagaataggtcctttgtatgttccgtttgttttctgtgaagtcttggataagacagttgttagtttgttcactttttccatatcataaaatcggacaggagagtaaggttgttgtttttttaattaaagacaatatttactaatatattctgagaaaatattttatttttaaaattgtgcctttttatttttaataaggatcaattcctgtattttctgaatgttattattttaaatcttaacccagctgtgaagcaagctaagtttagagaagactgtgtcaggcctaattgaactttacgtctgaaacataatttagttagatattagaattttttcgttttctttcctttacttataattgtctaatagaactcactttgcagttctttgttgatggagaatatgtatagttaaactcttgaaatatcattttattgcaaaaacaatgcgcagtaaatgaagtttgatttgatgattatatttttactggtagctaaggaaatatactctgtgtaaatttatttgcttcatacaactttttttcccctccctttttaaaagtaaaccttaaggaagtggagagtttaacttgcaaagtattatttaacttctgtatgtcaacaggtttctggttttaaatgatgctgatcctatacaagtgatattttataattattgaagaattattctcttagaaagggaggttattttttttaccttgttatagtgtaaatcttttaattatgatatgttccttagcagtattccttccacttccagaacactcctctccaaaaaatactacaaaataacaaaataccccctcatccctacattgtgataatctagaaataataaacttcagatataagtgattaaaacaacaataaaatggatgtattgtgatagatctagcaaactctattgctgcatgataactgccctaaaacgcagtggcataaacaaccattttattttgcttatttatttgtgaatcaggaattccagaagggctcacataggtagtttgttcttgatttgtgtattttcacctggaagtgtctatgattggatgatctcctaccaagatggcttattcacttgcatatattctctttgctccttagcctctgtctacatggtggtttttatttttattttctttatttttattttttgagatagagtctcactctgtcacccaggctggagtgcagtggcacagtctcagctcactgcaacctctacctcctgggttcaagcaattctcatgcctcagcctccctagtagctgggattacaggcatgcagcaccacacctggctaatttttttatttttagtagagacggggttttgccatgttggccaggctagtctcaaactcctggcttcaagtgatccgcctgtcatggcctcctgaagtgctggattacgggcctcagccaccatgtctgacctacatggtgtcttttgccccagcttctgcaggtgccttgggttcctcgtggcatggggaaagtagtcacacttctaatgtggaagctgcttccagatttatagatgttagaagcagaagctgcttggtcagttaagggttattcttgaaagtggcttggaagtggcaggtcacttctgttgtattctgttggtcatagtagtcacagaacctgccctttttattttattttattttattttattttattttatgttgttattttatgttattttattttgttattttattttatgttattttattttgttattttattttatgttattttatgttattttatttttgagacggagtctcgctctgttgcccagcctggagtgcagtggcgctatctcagctcactgcaagctctgcctcccgggttcacaccattctcctgcctcagcctcccaagtagcttgactacaggcgcccgccaccgcacccagataattttttgtatttttagtagagaagggtttcaccgtgttagccaggatggtctcgatctcctgacctcgtgatccgcccacctcagcctcccaaagtgctgggattacaggcgtgagccactgtgcctggccagaacctgtccttattaaagcagggtggtggtggtgtcaagaatggggctccaccttcttcctgagaaggggtagagttcatggcagaagagtatgtgagatggaagacattgttgtgaccatttttggaaaatatctacttcagtagaataaaacattggataaggggttggaaatcaaagagtgagttttttttgtgcggtatggcaataaaattcttactcccttttctgttgtcttatgatattgcagccttattaaccagaatggaagtggaatgtttctatttccatgttctgctcagtgttttaatctgttatttttagggtttctactgttatctgttgctttcaaacaagctactccaaaccagaaagaattctgaacaacttaagagttgttttacctaattcaggaattaccacagagtataaatgtaattcataggaagaaagtacagaagaataaggtatgtggaaaggaagaggactaacagaaggtgaattaatgctacttactgattttggcaattcaccttgggtgagaagcacgactgtctagatggaaactcttgtgtattagtgatctaacaagaaccagtgtgcttgctacaagactgccttttagaagatagaggtgtgtatagatgatacacagaatgcaggagaatttttttttttttttgagatggagtctcgctctgttgccccggctggagtgcagtggcgcgatcttggctcactgcaagttccgcctcccgggttcacgccattctcctgcctcagcctcccgagtagctgggactacaggcgcctgccaccatgcccggcgaatttttttgtatttttagtagagacggggtttcaccgtgttagccaagatggtcttgatctcctgacctcatgatccacccgcctcggcctcccaaagtgctgggattacctcggcctcccaaagtgctgggattacaggtatgagccaccgcgcctggcgagaatttttaagaacattaagaagaaataaacatggctaaactgttttgtgttatttgagggggataaagcaagatacatctcagaacttagagtgttttcacaattcgttgatggatattgctttgacctagcactgaggggttaatttggatggaattttttttccaatcgagctagaattcacagatcataaaatttaccattttaaactatatgattcagtggttttcagaatatttacaatgttgtgcaaccatcatcactgtccaattttcatcacttcagaaagaaactcacacctgctggcaattacaacccctcatcctctgacaaccagtaacctcctttttgtctctatggatttgcctatactggatgagaccttcgactgtgaacttttgagctaatgctgaaatgagttaaggctttgggggatattggttttgaaatgtgaagacatgagatttgggaggggctgggtcgaaatgatgtggtttggctgtgtccccacccatatctcatcttgaattgtaataaccacagttcccatgtattgtgcgagggacccagtgggaggcaattgcatcatgggatgggtctttctcgtgctgttcttgcaatagtgaataagtctcacgagatctgatggttttataaagagaagctcccctgcacaagctctctctgtctttgccttgtgccttccaagcaagtcacatggtggcttgccttccaacatgattgtgaggcctccctattcatgtgcaactgtaagtccattaaacctctttttcttcccagtctcagatatgtctttatcagcagcatgaaaatggacaaatacagaaggctttcagtcttcaccttgaagtatgatgttgactgtgggtttttcatagatgctgtttatcaggttgagaattcccttccattcctagcttgttgcatgtttttatcataaaaagatgttggattttataaaattctttttctgtatctattgagatgatcatttggtttttctcctgtattctgttaatgtggtacattatattgattgatttttgtattttgaaactaaccttgcattcctgggtaaagatagatttgtttttaaatagctttgtgtttttcagctggatgaatgtagaaacttgttctatcagcattattatggagacaatagaagtggacctgagagaatatagcctttggataaatgcttaattttcaagtgctaaggtgtaatataaatggacatatgcaaaggcttatattgtaatatttttacatcatggaaataattttgactcattaaacattatttctttgggcttttaagtaacttagtgaataatttgaggatctgtgcttatctgtgtcgtttctcatctgttgttaatacgccacattaatgttctcagagtcttgcaagttctagttgagtgttttgaccgagcacacattttaaacttgaaaattgataattatcaagtcaataaggaagggtcagatccctcttctgacaaagattgttcttagttgtttctcaggagatcctgtagcaggaacttgtcagagtagtaaatacacagacacatatctagaaaaagacaaaagatttagggaaaagtgcctggtcgcagttttaaagcagagtcaatattttcttctgcttaaaaactgcttataacttgacataaattctcttacattgcattctcatctgtgggaatggctgtttggttagatgcccaggtatctgtcaactctagttgagaaattgaagtaactaaccacgtgaagaagttattaaatcagactctgatgaagcagccttttatgctcttcctttttcctgctacaccagtatgtatatcctaaccagaaaatagcttcaagaatcagacatctattttgttctttatctgttttatcttcctgtaattgtcagacttcctcaattttttctcctaatgatttttttttcctaaaggagtttttcagattagaaaaatcatgtaattttacagagaaaaatttgcaaaattctataagatctttgggcttcttttttcttttctttttttttttttttccgagatggagtctcgctctgttgcccaggctggagtgcagtggcgtgatctcagctcactgcaacctccgcctcctgggttccagcagttcccctgcctcagcctccttagtactcgggactacaggcgcgcgccaccacaccctgctaattttttatttttactgcagacggggtttcagcatgttggccaggatgctctcgatctcctgaccttgtgatccacccaccttggcctccccaagtgctgggattgcaggcgtgagtcaccgcgccccgtcagcctttgggcttcttatatacagtgcatataggtaagaaactgacatttggatttgtttcattgcatcccattcaggctgaactctgccttatacacagcaaatttggtatttttattttttttgagacagggtctcattctgtcacccaggctgccgtgtagtggtgcgatcgtggctcactgcagcctcaacttcctgggctcaggtgatcctcctacctcagtgctgcaaggaactaagactacagttgtacagcaccatgcctggctgactgttaatagtttttgtagtagagatgggtttcgccatgttgcttaggctagtctcaaactcctgggatcaagtgatctacccgcgtcagccttatgaagtgctgggattacaggtgtgagccactgcactggccaaatttggcacttctataaagcagctaagcaaacaactttaaatgaagtgactggtctttttttttttttttttttttggaggaggagtcttgcttttgtcgcctaggctggagtgcaatggcgcaatcttagctcactgcaaccatcgcctcccaggttcaagcaattctcctgcctcagcctcccgagtagctgggattacaggtgcccaccaccacacccggctaatttttttgtatttttagtagagatggggttttgccatgttggtcaggctggtcttgaactcctaacctcagatgatctgcccgcctcggcctcccaaagtgctgagattataggcgtgagccatcgtgccggctgtgacgggtcattttaaacaacattctggattcttgaaaagaatgccaccgattaataatttgtaacttctcttatgcttttgacagtctgatgaaagctatgggctttctccaggtaaaagtgtgcatagttcatttgtgtgaactgagatataatatacaccttaaagtttatccatgaacttctgattaaaaacacccacctttcaccatgacatggtgaagaaaaaaataatcagaaacactcaccatctatggaacaaccaagttggtgatatacactggtttctaggttttacaaaatcataaaatatgtgtatggttcaaatacaacagaaattcatggcaactacaatttcatgttaattataatttaactagaaagagtgtagctgttgggtatggtggatgctgcgatgatcgatgcaacctaggtctctcctgattgttgaaggacttatttccccagatcgctggaagtgttatcaacagaaagccctccactttccctagagattgtcttagctaaagacaccaccttgcccgagggcaagccccctcccatggacatccagtgattgatccttatgaggtgccatggtttgaattccttccccctacttgggacaacagcttcagagctcctcgtggggttgtcagaatcctttgggacttcgtggcagctgaatcgctccctctgtacaatcctcatttttctcctcctatctactgactccgatcccaaagagcaccgtctaataaacttcttgcataataatgtctgtctcagggtctgctttccgggaaacccagtcttgggtagaatacagggtaggatatgagtgcaagtcagcatctttcaacccataaaagtagacctggcgaaaataaaaattcaatgagatgaacttgaatttaaattaaaaataagtgaaacatctcatcatatttccttcacaccttatattcaagtagtttttcagagtcttggtttctttgaatttatttgtgtctctcagtctttctttgaagaaagactccccaaatctctgaaagcttggtttgtttggttacacattatgaacttgtgaaaggtgtgggttaaataatacagttgcttacatgccccaaagaaacccctagaggttttctatgttggcaggtgaatatgataagagaatctccttttgctaagatttcttggactgtatttagaaaatatttggttttggcattatcattaaaattgtagatgtccattctaaatatatgaaaagtatggaaaagctataaaaagaaaaaaatctgtgtaaaaataaacttctcctcacttgaaattggtataatattacacttactttttggtgacctgtcttattcatgtaatagtgtataataaacaagtttttgtatccttaattctcaagaatatgaattgtaatggtataatattctttccatccagtggatagaccatatttaatttggctagccttttattgttaagtgtttaattattcccaatttttaaattattacaatacaatggatttttttaaaaaattaagcctcttgtgcctgctttagtttttaaaaaaatattggatctctcatcactaaaatgtagtgaactgagactaggctacctagacagccactgtaactgaacaacttcaagggaagccattcacatcgatgatgtgaattgagggcctcagtgaaatctcatcattgctactgccacagaaggattgccgttgtggatttatgtgccctctttgtcttttgagcaattttagcacagggaggtctgtcaattttttatatatgctgactagatagaaaaagaagggtttgagctattttccataattatctaccaggcagatcttgactggcagtgacctttggtcttaccagcttttgtgtcattgtatccagttgttctaatgcgagaggcccctagttccatgatctgtaccatgagcaaatctgtcaaggaactttctttcctaccagcaattaataaaatctacctggagcagtggactctgaaaatatattttcttaagggctataccattcctgtataattaaatttgaacagttttaaagataaaatatagtagtattctggtgaagtttattactttttaaatgttctcatcttccttagaagaatattgttatattttataattgaaagagatgttactagtcttttgttttacagttaaagtgatgagaaagattaagcaatttgctcaatgccacgtaactagtcattcattgcaataattcactccatgatctgtactatgagagaacaacacaactgacagggaaacccaaccaaggaagtgttacttgctacccgacatctttgctgggcttattgaggaccataagcagtaattgagaatactgatatgaaaacttttaaaaacccaaattgaatttaaaacattgcttagagtttcttatggttttgtcagtcttgcagcttctcatcgctggaaacaagtggagaagcaaaatttagatgtcagcaatagtctgggcaaaacattctttttttttttttttttttttttggtaaattatagttttgccttgtttgtacattttgtccgagtgtctgatggtggacaaactgttgaccagaaatcaggggacttagaacctgaaaaggaaaaattcactattaattactatagatccctctttgccaactgattatgaccagttcatccagactgtatttctgccatcaatactgaaaggtattattaaccaagaaagtaaaggtcagagcctttttgaataactgatttcatacaataaatttgatgctgatggctatttaaaagagctgtggaggcaccctcaaaaatgttcctttcccttaaatgatatttaaagtgagccaggggactgcaagaagtgttttgagctgtcttgtcctcagaactgtgtcctagaggaagtctcttctgcgtttgcccagtgatttgggcctcaaaggcagagtaatcagttccacttgactggaaataaatcacccagactgaaacatgatagctcctgacaactgggcagggctgataaaagccaaaacaaaagatgtcaataaatctgtgccaatgtggaattagtatgcagatttgatgaattcactctgtagctttgcagtcagcattagacttcctctgattttatcagtttttctttcttgttgaaataaaaattgtatgaggacaagaaagcctctatataaaataaccattttatttctgtttctttccaccctagtaaacagaactgtaccatgattacagaggtcattttaaggaataacgtcgtctttctccaaacagttaatttaaaaatgtttcttccttgggctgggtacagtgactcacatctgtaatcccaatgctttgagaggccaaggtgggaggatcacttgaggccaggagtttgagaccagcctgggcaatgttgcagtacttcatctctacaaaaattaaaaatcggctgggtgtggtggcatgcatttgtagtctcagctactccggaggctgaggctggaggattactcgtgctcaggagttcaaggatgcagtgagcagtgattacactgtcacacttcagccttggtgacagagcaagaccctgtctcaaaaacagaacaaacaaatatgtatttcttgagtttactactcaataatgataattatatatgatagtaaactgtatatataaacctgttgggtatcaccccccttctattatcattgacggcacagatgtgtagaataaatgccagttcctttgatcactacaaaattttgcttgtacagaaattgaatatatgctaataggtagtgatttctttctatgtcagggagagtttatacaaaaaaaaaacccatgggattataaaatgtatccttttctgtaacaattattttattaattttcaattttaaaactaatttatgtaacagaagaaaaaccttttaaatgttttattgtcaggtcctccttggtccgtctgtctgtaaataaactagcttcctttaaccttgaaagttaggctaaacagattatttgaataacgtcgtggtcctgaaatccttaacgtcaagcatctttggctctgcccagcagctttagtgtatggtgattagatgtatgtttcatccatgaaggatgtacttttccatttgcagtggtttggtacctcattctttgggggttcgttttattctttgcttcagtagggggtacattttaagtacatgatcgtagcaatggtatactatattaataaacactataatcataagaaatcatttatggaaagatgctttatgtgattactttttcagtttttcaccatagaacatattatttatagggtggtaattaagagtagattctggagctacactacctagtgattttcccataggcctgtagtgatgcttaaatcattgttccatataaagtccttgcatcagtacctggcatgtttttaagtgttggctgcttctgtaatctacctccccaccaccactgttagaatcgtcgttcttgttattttattttaggggttctgtggtttatagtcctaaacaatggagagtttttaaaaactggatattccgagcatatttaaaagggtatttttctgctaaacgtgattctgaacaatcatttttatctttatgttctagtatgtgcataatggatccagtttttctcttggctgttcaaagcttcttataaatcttatatttcagatcctatgggtacttgaattagtatagaatagactctctgctgaatattttataaaaatggcataatacatactgaaataatatgatatgggactatcagagtaaacagcatttataacctcaacattagcttggtgaaaaagaagagaataatgacaagaataatgtggtaacattcattcttcagctggtcagtgacacatataaactgaggtccttgatcacaacgaaagtgaggatatgtcatgggagccttcagtggggctcagctgttacccatcatgatgctgaattcagtgagtgagggctcagctgttatccatcgtgatgctgcagtcagtggggctcagctgttacccatcatgatgctggattcagtgggactcacctgttatccattgtgatgctgcattcagtggggctcagctgttacccatcatgatgctggattcagtgggggctcagctgttatccattgtgatgctgcattcagtggggctcagctgttagccatcatgatgctggataaacggaaagagaagtatttttatgggcacacatttcacccgacacacccacctcccaccccctgcgtgtttcgggtttgttcagtgcttacacagctggtttgcacctatctgtgtctatttcaggtcttcctcactgatggcagcttgcccagaggaggtaatcttagtgtccactgttctttttttattttgtgagatcctttcactatgaaatgtttgtttctcctcttttagaagtaaataagagtctgagaatagccatcccttttcactccgactcaacagtcagtctctctagagtgggtaattgaaaaagaaagtaacttgccaagaacttgctgacggcattttacctgtttcagcagcttctgcacctgagtatatcagcagaagtgtttactagcaaagaataatggattcctttaatagtttaactacatatcaggtataaaagtgaaattgttaacattttaattcctgaatttctccctagatgcagatgatggagtagaaagaagggtattatccttattatgcatgtaaggggtgtttgtatattaggtaggctcataaaacaaatctgtcttcttgtatgtaaaacttggttggttctgtgaaatttcattttaaataatgtttcttgtattgccctttcttgacaggaaagtctaatcaacagcatgaccatagcttttctttgtataagacctatatgttagcaactggaatgacctgcacagctggttaaacatgtaaacaccaaggcattgtgttctgtatatacaggtatacctcggagatattgcagattcagttccagaccaccacagtaaaacgagtcacacaaattttttggcttcccagagcatataaaaagttatgtttatactatattgtagtttattaagtatgcaatagcattatatctaaaaatgtacataatttaatttaaaaatactttattgcaaaatatgctaatgattttctgagccttcagcaactcgtaatattcttgctagtggagtgtcttgcctctgtgttggtggctgctgactgatcagggtggtagttgctgaaggttggggtggctgtggcagtttcttaaagtaagacatcagtgaagtttgctgcatcaattgactcgtcgtttcaaaaaagatttctctgaatcctgcagtgctatttgatagcattttacccacagtagaatttctttcaaaattagagtcaatcctctcaacccgtggcactgcttcatcaactaagtttattaatattctacatattttgttgtcatttcagcaatgttcacatcatcttcaccaagagtagattctgtctcaaaaaaaaaaagcaacaacaaaaaacactcttattactcattcagaagaagcagctccacatctgttcaatttttttttttttttgagacggagttttgctattgttgcccgggctggagtgcaatggcgtgatcttggttcactgcaacctctgcctcctgggttcaagtgattcttctgcctgagcctcccgagtagctggggttacaggtgcccaccaccacgcctggctaactttttgtattttcagtagagacagcgtttctccatgttggccaggctggtcttgaactcctgacctcaagtgatctgcctgcctcggcctcccaaagtgctgcgattacaggtgtgagccactgcgcctggcccatctgttcagattttatcatgaagttgcagcagttcagtcacagcgtcaggctccacttctaattctgtttctcttgctatttccacatctttagtgactacttctgctgaagtcttgagcctgtcaaagttatccgtgaggattggaatcaacttctcccaatctcctgttaatgttgatattttgacctcctattgtgaatcacaaatgtttttaatgacatcaggaatggtgaatcctttccaaaaagttttcaatttactttgcccagatccatcagaggaatcaccaactatggccttacaagatgtatttcttaactagtaagactagaaatcaaaatgactccttgatccatgaggtgcagaatggatgttatattagcaggcataagaaaaacatgaatctccttgtacctctctatcagagctctagggtgaccagatgcattgtcagtgagcagtaatattttgaaaggaatctttttttctgagcagtaggtctccacagtgggtttaatacaccaagtacaccatgttgtaaacagatgggctgtgatagaggcttcattgttccatttataaagcataggcagagtagatttaccataattccacaggccctaggattttcagaatgataaatgaacactggcctcaactttcagtcaccagctgcattatcccctaacaagagagtcatcctcttctttgaagctttgttttctttgttttttttttcttttctttttttttcctttttgagacagagtctcgcttcgttgcccaggctggagtgcagtgacatgaacttggctcactgcaacctctgccttttgggttcaagcagttctcccatctcagcctcgtgaataactgggattacaggcatggaccaccacacctggctaatgtttgaagctttgaagccagacattgacttatcctctctagctatgaaagtactagatggcatcttttgccaataaaaggctgtttcatctattaggttggtgtagaagtaacttcaatggcaaaactgccattacttttgcaccaaccaaatacattgaaaattcattgtttgttgtagccatcttcattgattgtcttagctagacctggataacatgctgcagcttctccgtcagcacttgctgctttactttacacttttatattatggagacggcttctttccttaaacctcatgaccaacctctgctagcttgaaacttttctcctttagcttcttcacctctctcaatcttcattgaaatgaagagagttagggccttgttctggattaggctttggcttgaggcatgctgtggctggtttgatcctgtatccaaaccagcaaactttttccatatcagcaataaggttgatttcttttttgtgtgttcatcggagtggcacttttgatttccttcagtaacttgactgtttggttccagaggcctagctttcagcctgtcttggcttttgacatgccttcctcactaagcttaatcttttttacttttcaaactctgcatgtagcatttgacttaatcatttctaaattttgactaaaagtgagagatgtgcaacttttccttctccctgactatttagaggccattgttgggttatgaattggcctaatttcaatgtagttgtgtttcaaggaataggaaggctgacacagagggagagagaagagggaatgattgatcagtggaacagtcagaacacatgcaacatttcttaagttcaccatctcatacgggcagagttcatggcaccccagataaattacaatagtatcatcagagatcactgatcacggatcactgtaactgatacaataatagtgaaaaagaaatgttgcaggaattaccaaaatgtgacagagacaccaagttagaaagctcttggaaagtagtgccgatagacttgctcgacgcagggttcccacaaaccttcagttagtaaaaaacccgtatctgtgaagagcaataaagcaaagcgtaagaaatccaggtatacccgtatatggagtactgaatttttgagtggcaaaattctctttactggttatgagttgacctaagtgttgatccgtatgagatttcaatagtagtgtctgattaaatcaagggaagactaatgctttccatctcggatgaactcagttcttacaataggctttggtctcttactgggcaattcagtggttcacccatacgattatctctttgttaacaagtgaaaatgtaagcttcagcatattcacataccctattctaaacttaccaaatctctttcttagcttttttgttctgcctgtcgagttcttcttgactctagagaggtaccttaaagagcttgtactaaatttattaatgtaagaaactacctgacaattggatccaggattgttttgtaattccgttattggcaggagtttttgtgaatccctgaatatagtttatggaagtccaaacttatattttattcatttattgattaatgtttactatgatctgagatgtactgtataggaaggtacaaaacagctggaggggcaggatccatgtctacttgagacatgtataaaacaaagattacatatggtttcatacactaatcagtgctataatgattgatagatagaggaatggagatatgtgatcaatatatagatacatggaagaatggaggagtgtgtatttatacataatatatacatgtatatgtatcattactggggtacagacaatgatcaggtttttctcttgggggtgagggcaacagactgttcctagaggagataatgtttatcttgcattttgaaaaccacgtagaaaaatcaggtagttctagtatcagctcaagaggagatggtgattatattctcctgcttcatttctctccatagaacttatctctgccctacactatgttgattcattcatttgttcagtcactcattccctccctccatcattcatttgtctaccttactagaatgtaagctccatgaaggcagggatttggtctgttttcattactctgtttcctcagcaactggaaaagtgcctgatctatggtgggaatttgaactcctgtgtatatagtgaatgaataaactttgtgagtagttggtttatttataattttcctttagcttattaaggatagctccttagaatttcctcatagtttgcttgattttttaattatacttgaataataatttttattgtacttgagtctccttgtacttgagtgataacatgccgcttgctgtacttgagtgataacatgctatttccacagtgttatctcatagtatgttgagtccccatcatcttacctgaactgatacaaactctaatggttttccatgtctatatgcgagtcctcttaagttttcattgaaagatcagatccttgcatgctgacactgccaacactggtactgttatttatttaaagtacagaactggccagaccacttctgtgcttaaaaatctctaagggcttccatctctctataataaaatctgtgctccttaggttggcacacaaactgttttatagcttggcttcagctgtataatgatgcattttcttaccatctcatggtagaataaaaatgagtctattcatttttctttttttttttttttttttttttttgagacggagtctcgctctgtcgcccaggctggagtgcagtggcgggatctcggctcactgcaggctccgcctcccgggttcacgccattctcctgcctcagcctcccaagtagctgggactacaggcgcccgccactacgcccggctaattttttgtatttttagtagagacggggtttcaccgttttagctgggatggtcttgatctcctgacctcgtgatctgcccgcctcggcctcccaaagtgctgggattacaggcgtgagccaccgcgcccggcctcatttttcttcatatccatagtgtctggcatgtaatacagaattcaacaaacgttttttgagtaaatgaatgcatgtaagtgtatatgaatgaatggccacaaaaatgtttgctgcttagataaaagatgatataagtaaatgaatgcatataagtatgtatgaatgaatggctaagaaaatgtttgctgcttagataaaagatggtgtaaaactaacctaacactagcctttaagaacacagtcttttctttatatagctgatttgtctttttcactgtttagctgctctatcctctgtcctccctttattctttgtgaagaaatccctcttggcatttacaatgtcattttagaagtaatcctagtcctcatggctttcctctctacatggccatctctatactggatcttttctgctagctacttttcttattttgttagggatgtgtgtgtgtgtgtgtgtgtgtgtgtgtgcgcgcacgcgtgtgcgcgcgcgcatacacatgtgtacttttttttgttttgcctacaagttcctacaaatttaatttgcctacaaatttaaggttttgcatgtaattctgaaactcttaggattaaatgatttctacagaatgcacacacacagacaaccctgagctatctgttttcaaattgaaatgattttgattgtgctattgtttttttatacatgtcctctcttttcccttaaatatttatgtacatttagattgaaaatcttcaagagcagcttagagacaaggaaaagcagatgagcagcttgaaagaacgggtcaaatccttgcaggctgacaccaccaacactgacactgccttgacaactttggaggaggcccttgcagagaaagtgagtggctggccccaactctccacacacgttttctgctttctcattaatctaagactggatatagaatacaaaagaaatccctgtgggcacaagggaaaagagctgctgtgtgctattgctgacatacgtagtgtgaagggaaacattttttttagatggagtctcactctgtgcccaggctggagtgcagtggcgtgatcttgtctcactaaattccacctcccaggttcaagcgattctcctgcctcagcctcccgagtagctgagattacaagcatgagccaccatgcccaagtaattttttgtattttttgtagagacggggttttgccatgttggccagactggttttgaactcctgacctcaagtgatccacccacctcggcctcccaaagtgttgggattacaggcatgagcccctgcacctggccaaattgctctgattttcaaacttcttgagtatctgttgacagaaagttttgatgatttctcttttctttaccttcctttatattttaagctcaatatatcaaaatctttcccattccccccttttttggtgtgtgagttgtgagttgtttccattgccttgtgggcaacatgtgaataatatatagagaagaaatatttgttagttattgtccttagggtgtatatataagcttttagttacctggaaattgaataaatggaaatattgcaaaagaatactttagtgatatcaaatactagttgagattataagaaaagaaaccttgggattcaaatgaataaacctacatccttgttatggcaagatgaataagaaggatgaattatttaaaaaatgtattctggccaggcacaatgactcacacctgtagtcttagcactttgggaggccgaggcgggtggatcatctgaggtcaggagttcaagaccagcctgaccaacgtggagaaaccctgtctctactaaaaatacaaaattagccaggcgtggtggcatgctacttgggaggctgaggcaggagaatcgcttgaacccgagaggcagaggttatggtgagccgagatcacgccattacactcgagcctaggcaacaagagcgaaactctgtctcaaaaaaaaaaaaaaagtggattctttaaaaacttaccattgtcttttgaatatagaagtttgaaattctgctaaaagcagaattacagtcatataagtgcaaaagggaatttcttcacatgttgatatattctctcatcaggagcggacaattgaacgcttaaaggagcagagggacagagatgagcgagagaagcaagaggaaattgataactacaaaaaagatcttaaagacttgaaggaaaaagtcagcctgttgcaaggcgacctttcagagaaagaggttaagctccccaaaatggaattagtttgtttgcttaatcattgcatgtgtctgtatgttggtgtttacataatgcatataaaaaagtattcgatggaaaattttcttaatattcttttagcaggcttttgttgaataccttaaggaatatttcagaaagctttgcagagacatagcggattggttcattcattttctaagtattactcactttgttttatgttggttttttacttactaatatttttatagacctaaagtaactgaagctcagatacatttggagaaatagtgtgctaaagataagaaagttgacagataaaaggaatatgcaaaaggaggaaattttatgtatagcaactatcaaagaacacaacagctattaaattaggtgacttaatatactttggtcttgtttttggagaatcctgttaatatgacctaaatagcaaagatgcctcatgctatgtaatcagatgatgataatgcatgagctttagcatctttctgtggattttctttctaatatctttaggcaatgttatggaagtttaaattcctaatagaatttttcttttaatagggaaaaatgtgattttttttttttcttttaagagactgtgtctcactctgttgcccaggctggagtgcagtggcattatcatagctcactgcagtcttgaactcctgggcccaagggatcttcctatttcagtcttccatgtagctaggactatacgtgtgcactaccatgcccagctaagttaaaaaaatttttttttgtgaagacagggtcttgctatgttgcccaggctggtcttgaactcctggcctcaagtgatccccctgtctcagcctcccaaaatgctgggtttacaggtatctggccgaaaaatgttttctgtttaagttaacgtagctactgaggtttgactacttacattcacaaagcttgatctactttggtttattttgtattgacagaactctttacatcactgttcaatgggtatttcttgagaatccatcttatttgttaagagttgaaagctagagctaatattgttttatatttcatgaatgagtttccttgtaatgggagtatgtcagcatttggtaatagaaaggaaattacagctaccatgataaatttaaaaatttaaacctctattttttttaaaattatttattctagatgtgtgttccttcttttaggcttcacttttggatctgaaagagcatgcttcttctctggcatcctcaggactgaaaaaggactcacggcttaagacactagagattgctttggagcagaagaaggaggagtgtctgaaaatggaatcacaattgaaaaaggttaaagaaaaaatttcacatttttttgctttgccttaaataagaacatagtagataaccttagcatgtttatatggaataatttaccaatggaataataatccgccaaactttaaaataccatgtatatctgaattaattatcttagcattcttatcctactttattttattcaagataatccccaaatctttaaaaattgacagttcagagaaagattaaaatatgcaactctcttgtgggtaaaatatgagaccagagtgtaaaaatctctgttacctgatatttttctcccattagaatcagacttctgccaggtgtggtaactcatgcctgtaattccagctccttgggaggttgaggtgggaggattacttgatcaggagttggacaccagcctgtgccacagagtgagaccccatctcttaaaaaaagaaaaaacggtggctcatgcctgtaatcccagcactttgggaggccgaggcgggcagatgacgaggtcaggagttcgagaccagcttgaccaacatggcgaaaccccatctctactaaaaacacaaaaaaattagccaggcttggtggcgcaggcctgtaatcctagctactcaggaggctgaggcaggagaatcacttgaacccaggaggcagaggttgcattgagccaagatcgtgccactgcactccagcctgggcgacagagcaagactccatctcacaaaaaaaaaaaaaaagaaaaaaaaaagaataagtgggagcatattttctaatttaacatatgtagtaaggtctgagactcagaataattgttaaatatcctgtttcagattttatctcattttggagaatgttaatttcctagctttttttttaaagacagggcacatattgtcagaaagttttttttatttgttatatttttaatttctcttagcaacttattgggcctagaattttattatcttcaccttctacattagggtctattttttggtttatagcttatgtgtagatttacatgaaggactatttggcgtattttcttcttggaaactattactgtattattagtgttctaatttacattttttcaaaagcctgtgcttatcattgaaattttaaaagtagatttcttctctgttttgtttggagtaggaaatgactggtcttgaggtaatgataattggagtcatttttgacctatttatagcttaagaatgtatatcctgtatctgaatattggcattccatgtcttcagcatgagataatatcctcagaatttattgaggaaaggattgaaactcaacttttgagatatcagatttttttgtctttttttctttgttttttagagacagggtcttgctctgtcgtccaggctggagtgcagtggcgtaatcatagtttactgtgacttcaaacttctaggtataagtgatcttcctgcctcatcctcttgaagagctgggactacagacccatgccacaacacctggctaagttaattttgagacagagtctcactctgtcgcccaggttggagtgcagtggcacaacctcggctcactgcaacctccgcctcccggtctcaggtgattctcctgcctcagcctccagagtagctgggtttataggcgcatgccgctgtgcccggctaatttttgtatttttagtagagatggggtttcactattttgaccaggctggtctcaaactcctgacctcatgatccacccgcctcagcctcccaaagtgctgggattacaggcatgagccaccacacctggccttttgtttttttttaaatagaggggtcttgccatgttgcctaggctggtctcaaacccctgcctcaagagatccttctgccatggcctcccaaactgctgggagcaaggccactatgctcagccttgagttatcagaattttaaaaatgcttaatgcttttttttttcccttgtagagtgaaatatttatttctatactctgatttttttattgaaggtttttttttcaccatttttttaaaccgttaattttgtttcccttgattatcttactcttaaaaccattttctgtacttttctttctttcttttctccctgatgcttcttactgtctttggcatcctggaatagtgtggagccactcatccaagccagtgagtgacctagccaagtgttgccagaaagtcccagttgatagtttcttttctgacttttgtgtgaatgacatttttatcaccctatagataaatgaatatacttaaccttctcacctctcccttcccgaaataggaactctaggttgtttttttttttttttaatttatattgaggtgactacaaaatagaaaggcttctctaagaccaaaatttttcctgagactttggaaactgtttgcatttctgctgcttttaccttgttttgttcctagtgagttaattcattcaggactgcttctctttgcttttatttccaccatgttgtggcttttagccacaccagtttagggtacagtttcgctaacacattaaaatatgtttctgccaatagagtcttttgtaaaggccatgcttagtaactgaattttgacaactgatgaaacctgaaacaaaagaaattggtagaggacttaatctcgaaagtacctctattgcttccacaaagcatttaacaaaatttacataaatgtttctcttttgctcaaagtactttgaatcagagctttcctaagtatgtgtgttttcccctttaatattttttgaaaccattttaagggactaaatatgttttgttgcttattgaataaggaaaaaaacgtgtgttagtctttactctctcattaaataggttatgtggtgaaaatgttgatttctatgggaatatgattatctgcatggttttgtaatcttacgtgttttactatgacatgtatgaaatacaaaggaacaaaatctttgcctccagtgtatgagtactgaggttttaataatgttaaaggtaggtgtttttcagtagaacaaggcctgtggatggagagcttaacctttaactcagtattttaaggaggattattcactgttacgtcagcctctcttgtccaaaggtgatattttatacaaatactgttatttcactaaagtttgcagcttttgcttctgaatgttcttgaccttttcacattctaaaagcaaggtgtatggagtatctgcatttttaaagcataggttaacgtatagttagaacttaatgggtaagaaaggggagaagaaaatgaaggcatgaaattaaacaccttcatccagaaaatacctttcatattgataccatgataagtgactatggacagaagaaatgcttacatcttgaattaaatgtcatattccacaatttagaaatccattttatcttcatttatttttttgtgacagagtctcactctgttgcccaggctggagtgcagtggcacaatctcgactcactgcagcctctacctcccaggttcaagcaattcttgtgccacagcctcccaagtagctgggattacaggtgtgcaccaccacccctggctaatttttgtactcttagtggagatggggttttgccatgttggccaggctggtcttaaactccttgcctcaggtgatccacccacctcggcctcccaaagtgatggggtgacaggcgtgagccagtcactgcacctggcttagaaatcccttttaaagggatgtttataacactgatttgaaaaatatgcctttttttgagtttgtattataatttataaagttgtaaaggtctttaaggggtttaaaattcttggaattttattttaaagtacaaattaactcagcaagaatttagatgtaaactactctgatacagaatttgttgtcataagggaagggaaggtttatagtatctttgattttttttttcctagcttgatttattttgtctttaaagattgtcatttagtattcttttattatctttatcattattattttatttttttttgtagaggcgaggtcccattgtgtttccctggcaggtcttgaactcctgggctcaaggaattctcccagcttagcctcccaaagtgctgggattagagacgtgaaccactgcacctggcctcatttgatattcttaataatattccagctacatttaatcttgcacttatatttaattactgattaatttctcttcttcccaatcatttttcttttcctaccgtttaggcctatgggctgttttaaatcaaatggaaactagcacactgcttttgcatattcattttttctacaaataattgagtttttactctgtcagttaccacactgtgcactgaggatatatagtggtggacaagacagacctgtcccttgacttatataatttatagcctctattaagaagatagacacttaaaaaggtaattgtagtaaatcacatggtgtgagggaagcttatatcaaggagaactaacttaggtcaaggtcatggagaacctcctaacaaaagcgacactttctaagctgagacctcaaagtaaggactcaccagcgtgtatgaaggcccagaatgctgatatgcagtagttatatttatatttgtggagttataataaataatttataataaattattagaaatcagaattatctcagtgacgttaaatgccagctggccttcacttttgtttacacaatcatcttttgtgcccctacatcaagctgcctcctattgcctatttcgtcaccttctttcttcgtagatactaagaattttctcagttacttctgcttttgtttgcatcttcaatctcttcgcctttgttgtcccctctctttatgtgtaatatgatcagctttctattgaaatatctcctgatcttggtactccttatggtcttcttccctctctccttttctattagatatatttatagccttctcctgcccatgaaggattgactgctacaggaatttccctcctacaattaacaactcaaaaactgggaaaccacgtgaaacaactgattttagacattggacaacattcagtgcagaacagtgctctcatcttaccttccaaacttatatgatttttgtttcttaaaatatacttcatatgtgtatcaaggttaagggttagggaagcctatatttaagacataaaagatttttttctacacatgtgaagccttaaacaaatgaacttgggaaaggacttatcttaaaagtatagctgttactttcaccaagcgtttaatacaattatataaacatttctcatttactcaaggtactttgcttcagagctttctgaaatatttcctaagaatatatattttctcctttaatattttttcaaaccattttaagggactaaatatattctgttgtctattgaataagaaaaaataaaacgtctaagcttttgtcttctcattaaacacattatacatacatggctttagagattccagaagacagctagggacttgaaaattagtttttaattattgaaactgttttgtattccaaaatgcattaacaatattagttgacttttgtaggatcctgaataaaaatttttttctcagatcttagtgtggttctttcaaaaaaatttttcttaaacaatttttttttccaatagagatggggccttgctgtgttgcccaggctggtcttcaacttatggctgcaagcagtccccctgcttgggcctcctatagtgctgggattacaggctcaagccactgagcccatccttaagtgtggttctcgatttctgaattcatttgtttgtcccatattattttgtaaattctctaatccttgcatgagggaggtacctgtgtgatggtagcagctgttttcttaacctgactcacatttttatggcatcacactcccagtatctgtttgattctagatgcccaaggccatgtgagtcacacgtgttaggtaaagcagcatataggaaatggaaatggaagttagggtctagtgggagttaggtctctgcactggtccggctatacgatcagcagtgagtccctggtgttgccttttgatattctcttggagagatcaataacaacagttcaatgactgttagtttgtctcactaaactctgaagcatcttttgccttatgatggtgtttgatttaataatattcagagatgtgttatttaaaacaactaatctacttggaacctaagataattctccatttattactaatatttgtctatataatacttaagcagataaaaaccttataaattacaaactaactggtagatatttgataattctgtacttaaattggaatataaatcattgtttgggacatggtttgcccattgccacctgtgtgtatctgataggattgaaatgcttttctttgtaggcacatgaggcagcattggaagccagagccagtccagagatgagtgaccgaatacagcacttggagagagagatcaccaggtacaaagatgaatctagcaaggcccaggcagaagttgatcgactcttagaaatcttgaaggaggtggaaaatgagaagaatgacaaagataagaagatagctgagttggaaaggtaagaaagtgaagctgattggggcttatgaggttaaagtatggttttaaaagtatgcttttggggacatactttttcagtgtatctaactctgaatttaggttctcgaattcttgctattactgtattagctgccttttttctaggtcagttgtacgttctttgttgaggtgtctgaaaggcaacatagaatgggaataaattgggaagctatgggctgtaacataattgattggcaaaaaagagagtattcattaatttaaaattaaagttttttttactggcaaatcaagagaggacaaatgtctactttttaatttctctatataatgatcaaatgatcctcaagcaaaggagttaatcttttatcactagtttagacctttgttgttgagctaatgctctgttgggctataaatttttagacttttcacagtttttattgttgaaaagcacgctgttacttcagtgcattagatcaaaattaggaggagagacactttgaggacaatttaggagccacggatatgtttttttatgaagctgtctctgacttggaattcttcaaaatattctgtgtttgaacagatctaggcagacaggtctcctataatttttttggtgtgttttcttattattttatgctaaaggtcaagcatgtgcctcttgacctcttcttttacaccacatatttaacataaatgtaaaactgtgcagaaacaactctgccggtagaactttgttaattacctgtattctgaacagccagaaagactgacagtgacagaaaggggtcactaatctacttggccttttgaggactgatccttaagaataatttttttttttttatgatcttgaaggctgagaagtattagagtacttccataaattttttactaagttttaaagttttggggttagtggtagacttgatactgtcctctgaaggtattattttttcctattctatagtcatagaattttaattttcaagaaaccaaaactataaagtctaaccttcacagttctccttcactgtactgaaagtgtaaataacacgggctgattacctgctcacttatttcctcttattttggtattaactctactcattttgttcagttctgaataagatatatggataaaattctttaagtcagaattttaaaattaccatagcctcaagattagattatgtacattttttatgtcttcatttttgcactgcacccttccccacaacacacacatgtacacatgtgtatataccccctcacccattacgtgcttacgtgaatacatgcctctctttgcttttggaaaggcttgaaatctgcaacagtactgcatagatacaaaaatgcggtgcttttgattgattagtgacttcccactaaatatatttcagaaaagaaattccttgaataagttttattttatggtttgatttcttattagaaatctacatttgaaattattgcttgctatttcaggcagcttgcttgaaaatgtttttgactcatttttgtcaccaatattgattttgggagatggatgtgaactgaaggagagtaagaaataggactaagtctgtacttgatatccaaagcacaccaaatagcagcttttattagccactgtatttctcacattttgagaaagagttgtaaatgatctactctttccacagaatgtaactcttataaaagttggaaaaagcactgtagagttctgtcctctggccctattgcattataatttcgttttaggattcagcacagtttcttggctactggaaaaaaaaaaaaaaggaacagctttcataactcagcttttgctaccaggtttgtagtttgctacttggtaacatagtttaagatgctgaataaacagtagaatcatggaatttgtgaaagtgatcgagcatggcattttatggaagaggaaactgaggcccagagaagtcattgctgaagtgacgtggtggttgagccagagctagtagaatgtggtttgtaaattccagatcaattttctttctgttctgccaaggctagttatgttccttttggacttcctggcaactgttatttgaagactccttacccttaggtgatttattcttttaccccatttggacccaatgtcttaagtagaagtggttatatttagtattatgacttgcttacaaactaaggtagattttagtttcacttatgcccttgaatgccatttttataaactgagctctgcttattttaggagataatcagtgcattctttgtcaaagacagttgggattatgttatacctcttgttcccagatttagtactcgtttgcatatgtgtggctgctgtgtttcttactaatcatttgcttcctatgttgccattccactatttcctatgcctgtgtctgtctccctatagtttatcatttgagattcttcatttttctttttgtcttaccatggtcctgttccattggggtttttggcgtctgtgtgtttatatgtatatgctccttctgccccttggccatggctgtttctcagaaagccagtctcgtgcaaattgtacccttcatgccaggtttctgtccctgtaccatcagggggttttgtttgggacttcctgggaaagtgagcattaagtaaggttacagtcttatactagagtgaattgctactgctgcttttgctactgctggggcttgtttggaattttgcttgatcagagttaaagaacagctgattatatgtcaagttgaactgtacctctttaggtaccctactttttgatataatcagtctgtgttcgttctggtaaacttctgatattgctagttgtgattgctttagtctttgttttactctttaaatagttcctcaactaatgtaactgtagtgccacactgtagattcagcatgtagaattaatttcttaagggtgttcagcaacccactaagtgcaaaaatgaaaggagactgttacaataattgaactcaagaaaatccttagtattctttgcattttatagtgcttcttataaaaggatctccaatattaaatggttcagattgtattatgaaggattcccaggcctgttctttgtgatctaaagaaataaataaataggtccttcccatgttggctgttacagaaaataagagttcttgtcagaagatgatttagtgttgtcctactctcttgacccactgcaattttaaaaagaagattggataagcccattaatacatctataaatataaaatattttccccaattaaatcttaagaagtagtacttctaaattcatgttccatactgtggtgcatattagttggaattcagtgagaagcagaattagtaggatacacacacacacacacacacacacatagagatagataaatacatatatacacacatatataaacacacacaagcatacatatattatgagatttatacgtatatttatatatattaatatatgcctacatatattaagagatttattacagagaatagtcttgtaaaatcgtggggctggctaagcaagactgaaatccctgtggcaggctatcaggaagagaagatcgtgagcaggatggaacctgttgcaggcacaagccaaagctgtggtccacaggcagaattccttttctctcctgggaaacctcagccctgttttaaaatctttccaaaggattcatttatgtccattgggattatctaggttagtcttttttacttaatttgattagaggctttaattatgtcagcaaactaccttcacaagcaccatctagattaatatttgatggaataactgggcactgtaacatagacaagttaatatttcaaaaaagtcatcatctgatggttctggatagtatacaaataaacaaacaaaccagagcttgaaaagtcgttagataagtaaataaatttagagtagcctcaggaaccctgaatgtaactgcaaatttctctcctaaaatgagcatattagagtttctatttagattaatagtgagtaggcttttctttgctatcatgtttaaaatacttagagtggctgggtgcagtggctcacgcctgtaatcccagcactttgagaggcctgaggcaggcggatcacctgaggtcaggagtttgagaccagcctggccaacatggtgaaaccccgtctctactaaaaacacaaaaattagccaggcatgatggcacatgcctgtagtcccagctactcaggaggctgaggcaggagaatcgcttgaactcaggaggtggaggttgcagtgagccaagatcatgccatcgccctccagcctgggtgacagagcgagactctgtctcaaaaaatgaataaaataaaataaaataaattaaataaagtacttagaagcgtactggaggctgatacaggattgcttgctgtctgctttttcactcacgctgtccatcttagctgaatgttcccatgttatagcaccaccctgggaacattgtcccctgtgccgtatattgtattgtgccttataattttgctttttaatgtgctttgttaccttttttctaataccatgactaatggattcacagagtttagtgtttgcagcagaaatactcaattttactctagtatgagattgttagattcaatatgccattcaaaacttgtattcagagaatgacaaccatctgattttcatataatttagataacagaggttgcctttggtttatcaaagttagaaattttcagtgatccaaagaataatagagtctattattgtgtgatctaaagattaataggaattgtggatttactatatttcctgatttgagggaatataagaaccgggattttaatggatatagattttttgggggcggggggcagggtgtgttttgaaattcagccaagtgattatttatgggatagtcgagaaagacctgtctgataaagttattgatatatgagcagcgatttgaaggaggggctctataagaagtccgcagaagcccctaaaaaaaccacaacaactttgaggcataatttacatacaataaaatgcacccattttaagctgattgtttgagctttgacaaatctatacacttatgtgactaccaccatgatcaagatatatagaacatttcctcatccccaaaagttcccttttgcccctttacagcaaatctcttcccaaccctagtcccagcctctgcagatctgagacctacttttaaaattaattttatacattaaacttcagtttctcccttttgccttaacatttaattttctactttcccattctaacacaaccacaagtatgtgtaattccctatttcctcagctccagaagtagattcagattttttaaagccaatcaggataatagcattctctttcttagtgactagtttcgcattgagcacatatgcattagtgattggaaggaaaaaccacagggaggcttctgggaatgattttcttataagacagacttgcaagaagaaagatgacccctttctcctgaacattatcttgtcgggatgtgatacccataattgctgcagctacttctgccaacctaagatgaagccagcgtccagagagtgacagttaacaaaacctcagcaaagcagagttggaactgaaatggactattcctgaaactgcctctgtgctgcttgttatgtgagataggacaatttctgattgtttaagccagtttgaatgaggattctccgttacttccaacccagtgcattcaaatggatataattatgtacttatttccgcccccccccccctttttttgtaatggaagcaatcattttgaaaagagttaaagttttttggtaagtcaaataaggatcaatgctgctgaaagctgggacaacacacgggccctgaccaaattggggtttctttgtctacctcataccttccaaatcaaaaaataatttccctagtattttaattactcccccaaatcaggaataacttcctcactgtgctgattttggttcttttaaaataaggtggtaatttgaaggtaatagttaaaccagtcatagattattctatgccattcttttcaaatcagcccactcaggtgtcagtcctacttttcttttgttgtagtcctctttattctcctttgtttctgcctccacctcatcccccacccaaatgcctggaacagatctcaccctttcgtcttttgagaggaatacatatagcagatttttgcctccgactaggcagctactttaaagggggatgtattttgaatctaaggaagatacccaaaaattttaatgcagtttgtttagttatatttgttcattttagctgccctgtctacatcatgactttttgggttgggggggtatgtgttggaaaggtttcttatgtaggttttttttttttttttgacagaatctcactctgttgctcaggctggagtgtagtggcgtgatgacagctcactatagcctagacctcccagcctcaagcgatcctcccacctccgtgtcttgagtaggtgggaccacaggcacacaccaccatgcccagctaactgcttaatttttttgtagggctggtgcctcactatgctgtctaggctggtcttgaactcctgggctcaagtgatccccttggcctcccaaagtgctgggattacaggcatgagccaccacacctggtgcatgtgcgcacgctatttctctctctctctctctctctctctgtctgtctctctgtctgtctctctctcactctctctctctctctctctgtctgtctgtctctctctgtctctctacacacacacacacacacacacacacacacacacacacacacacacacacacacacatatatatatatatattttttttttttttttttttttaagacagattttccctctgtcacccaggctggagtgcaatggtatgatctcagctcactgcaacctccacctcccgggctcaagcgattcttgtgcgtcagccttccgagtagctgggaatacaggcatacaccaccatgcccagctaatttttgtattttcagtagagatggggtttcaccatcttaaccaggatggtctcgaactcctggcctcaagtgatccgcctgccttggcctcccaaagtgctggggttacagggatgaaccattgtgcctggcctagatttttgttatacagatgtttgaggttaaacaactggtcctgcattacataagtaggtagcagagtcatgcctaacaattccagtgtctgtctctccttcctgaaaagaaatccttttcaggtgttcagttttcattaatgacctcacctcctagaagaggaggctgtagacagctagatgattcagagtctgttcacttgaggatcttactgaggccagagtctttcccacatgctggaatgcccacttacaggacaggtactgcataactggcatgtgggttgttttgctgctaggggccagtttttctacacatgtgctttttaatgcttctctcagtctggactcagttaagggatacgtctggctcaaagagactaagactccatcaatacagaagctattgtcatttcatttatagattatgctagcattggcgtttatctatagcttgtctaatagctagaaattccagtgatgaaattttagttccttaaggtctggttgagctctactggaaggtatcacttaacataccacagaggctggtcatcccagttatcatgtgcccagaatgtagtagtatcagaaagaaaggacttgttgaactttggactattttttttgttttgttttgttttgtttttgttgctttttttttttgaggcagggtctctctcatccagggtggagtgcagtggcactatcacggctcactgcagccttaacctcttgggctcaggtgatccgcccacctcaacctcctgggtagctgagactagaggtgcatgccaccatgcccaactaatttttgtattttttttgtagagatgggtttttgccagatagcctaggctggtctcgaactcctgggctcaagtgatccatctgcctctgcatcccaaagtgatacgattacagaggtgagccactgcagccagccctgaaatttggactcttaagtctttggtctttccatgttcgaagccaatattaaatgatagtagcttgggaggttatttggttggaaggctaataagtaattttggatcctaaactattaatactaatttcaggtcctccaactctagtagagagatacagaatacagagggaaaaccaaaatattgcactgctacaattattctgagaaagatagaactggagatcagttttgttgttcgtatatacataaaattcttagggctagccttgtgagtagttatgatggaggtaactttgtttttctattttgtggtggttaattttatcttctttgctaaccatcttttccatacctcattgtattagttcgttctcatgctgctataaagacatacttgagactgggtaatttataaagaaaatagttttaattggctcatgtttctgcgggctgtacaggcttctgcttctggagtagcctcaggaaacttacagtcatagcagaaggtgaaggggaagcaggcacatttacatggccggcaggagagagagagccagcaaagggggaggtgccacacactttcaaacaaccagatcttgtgagaactctgtcacaagacagcactagggggatggtgctaaaccatgacaaaccaccgtcatgatccagtcacttcccaccaggccccacctccaacactggggatcacagttcaacatgagatttgggtggggacaaaccaccgtcatgacccagtcacttcccaccaggccctacctccaacactggggatcacagttcaacatgagatttgggtggggacaaaccaccgtcatgacccagtcacttcccaccaggccccacctccaacactggggatcacaattcaacatgagatttgggtggggacaaaccaccgtcatgatccagtcacttcccaccaggccccacctccaacactggggatcacaattcaacatgagagttgggtggggacaaaccaccgtcatgatccagtcacttcccaccaggccccacctccaacactggggatcacagttcaacatgagatttgggtggggacatagagccaaaccatgtcactcatctggaactattagctcttggcttttacatcatgattaaactttaattttgtggactaccaagacaacctagtgtgtatttatagtattgtttttaagggagttatattttgatttataaacaactgactttgttaaaaaaaaaatgttatggccaggcacggtggttcacgcctgtaatcccagcactttgggaggctgaggcgggtggatcacctgaggtcaggagttcgagaccagcctgaccaacatggtgaaaccctgtctctactaaaaaataggaaaaaaaaaattagccgggcatggtggcaggcacctgtaatcccagctatttggtaggctgaggcacaagaattgcttgaacctgggaggcagaggttgcagtgagctgatactgtgccattgcacttcagcctgggcaacaagagtgaaactcccatctcagaaaagaaaaaaaaaaaaagttatgtgatctgttcataggatttgggctaaattctgagcatactaagaacacccttgattaaaaacaaaaatcaacaagattagcccaaatcctatgaacagattacataactttttttttttttggaacacaaagaatgaatgaggtcattttcctatcatgccagtagtgatttttaatctgggagtgttatttgcacatgtgtatgtgtaagagaaagagaacttttctgatggcatttgggaaaatagctgccaggcttcaacttaatgcctaaagattattgccttttgagtttttaaattttcttttaaagatttcacaactagtttctaaaatttttatacaatgaaaatggaggtttttatttttcataaatcttctaaaatgtgttggcaaacttgaactagtttataggatgatattaccaatttttggcttgatagcagtcaaattttgaagatgaatgctttttttcttatctgtcttttcttattcttttctctttgactgaaagttttgttccctttatttgtttgtgggaatctgacctattttaaatgttactttttttgaaaaagaaaactttactgacctcctttcgctagtaatctctctttcctttacttgtgcttttccagtagtaactatcacattctgtcctgtgactgtacattagagagaccaatgtatatatgttataaaagagaagtagcactcttttctcattctgctatctaatcatctcacatttccttttctttttttttttctgaggcggagtctctctctgtcgcccaggctggagtgcagtggcacgatctcggctcactgcaagctccgcctcccgggttcacaccattctcctgcctcaccctcctgagtagctgggactacaggcgcccgccaccacagccggctagttttttgtatttttagtagagatggggtttcaccgtgttagccaggatggtctcgatctcctgacctcgtgatccgcccgcctcggcctcccaaagtgctgggatttcaggcgtgagccactgcacccggcccacatttccttttcttaccattgcccataatattcagaccctttaggagttaaaaagagagattcagtagtctcccataccttgatattatattgaaaatatttttatatttcttttatatgtacatagtatgtttacacatgtacatgtttatatatgcatacatatatatttgcacgtttttccttctgtaaaaatgtaagtacattcatctgcctatattcttatacaatttaatataattcagttgaattacttttagatttgtagattaaacaaaagtgtagataactttccctttctcctttttgtcacaatgaaatgccatttctgaccttgtttttgtattttaacatctctgaaattgggatacacgtacaagtaaatggcatggtataatctaattggtataactttttttctttctcagtaatataaaatactttttactatgatgtgtcttctatccttggtgaattgatgttaagaatgcattcaaagagtgaataaaattgttttgttgaatgtgggagtaggagaaagtagtatttctaaattaatattattttgtcatatatttcattttaaatgtacgtgtagtaaccaagtgaatgtatttactagtataaattgtaaattagatatttgacgggtttacctatatgctgagtttgtttatttaggttgaccaaaaacggtttcttttggaccatctccttggcaaaatgggctttatgatattactttatgttagtatcccattatattcaggcatctgttgcatagtgtaacccggaaatgtaaacctaggtatttagtctttattctggtaaatatttttccttaaattttgaattgatagtcatttactgtgtcttcaaagatctaccatatagaaattaagccgtatgcaagattgacataaactgctatataattcatgaggaaagtgtctctttagagaaaaatattcttacttttaaatttatggatatgcatcttcaatccatgaagtatagtgtcagagaatatgctcttaatgtggttagagtggaagagagatgactggggctgcggatggtggctcagagtaattatataatatgtgttcttgcttgagggagaatggtctgtgtttaaaaaatgaaaaaactgaaaaggaaaagaaagataccagcatattacaactgaagatgactggttctttatctgatcctgcttgcttcagcttgctttctggggaagctgcttgtttctttcttcttcctccttgatgaatatcatagacttcctttaaaaggagagtaagttacaaagctttttgtagtcagttctgttaggttatcttcccaaagtttcctgtgggcacagcaccttatagtttgttactgtggtcttacaggaatctgtgtttaatggctactgtagtgtttcacctaaaagtataaagattaggattacatataattcgatgtacagattttttctcctgaagttatttcccaagagttacagtttagccggacgtggtggctcatgcttgtaatcctagcactttgggaggtgaaagtgggtggattgcttgagtccaggagttcgagaccagcttaggcaagtggcgaaacctcgtctctacaaaaaatacaaatattagccagttgtggtggtgtttgtctatagtcccagctatttgggaggctgaggtgggaggatcacttgagtctgggaagtagagtttgcagtgagccaagattgcgccactgcactctagcctaggtgacaggtgaaaccctgtctcaaaaaggaaaaaaaaagagttgtaatttgatgctaaagtgaaatatgattcatgaataataaagtaggtaaaaattaaattaataattaaagttgctctctggcaggaatgcattccattttttcccatggatttacccgtgtgttatgtaaaaacttgcatacaaagaagactcagttaatgtccttgttcatctaaaattattttgacttcctgtgtcacaaccaatgagatagaaggatcattgggaacaatcatttagagatcggcttctttctgcctttgaacattgtctgcattttacacagcgttatagatgctaaacgttcatggagttttatagactcctaaggaagcatcataaaacagataaattatgcccaggtgagatgtcagcagacctacattcttactctttttgagacggagtcttgctctgttgcccaggctggagtgcagtggcacaatctcggctcactgcagcctccacctccctggttcaaccgattcttgtgcctcagcctcctgagtacctgggactacaggcgtgtgccaccacgcctggctaatttttgtatttttagtagagatggggtttcaccgtgttggctaggctggtctcaaactcctgacctcaggtgatctgcttgcctcggcctcccaaagtgctgggattacaggcgtgagccactgcgcctgcccggctgctacattcttattctgtatctgccactcaggcaccatgtgattgccagcaagtcgttttgtttctgtttttcatctcttcatgttacaaggtaacaaatcttgtccttcttatctgtttttattctcacaatgactttttaaaacttgtaagtactgaattatacttttgcaagacatcactaagtcttagaaaacattaaagtataaatggaaatggtgcttgcattcaagaaatagatattttgtttcagattcttaaggtacaatttagaccatgaagctaatccagatgatactggtcgttagaagccctaactatttggaggatcatactaattacagtgaaactgattactttttgaaaagagaaaaactgcttgttgttgtaaaagacagtaatgaactgtaagggctacatgctgtgcaggaatattaagcatgactgctttatatctcctactgctaagcagcattggaactgaattgatgtaaacaagcctgtgtattcttgttcattattgcttttagattgcaccatttgaggattgtggtagatttggagtgagaagtactagttgttattaggagaaaattatgttttaacatttgagaaaattatttcaagtacattaaagttctgtattctacagaagctgtgtttttctgcttttgcttttagataacttggattctcttaatggaatggggtggttaaggcgtagttagttataaggtgggtgtctataaaactaagcagactaaaattgtgcagttacttaaagccaactctgactacttaaatgagaatgagatggctaaccttctctatttttcttagtgtttaagaaattgttttttttttcctgccccaggaaatggtaaattttagacaacttttttttttttgagaaactttcattaaaatacaatggtgtaatctaataagaaagtaaatttgttgagagttgaaaatctgaaataattcttttttagtgactgtatagaatttgtgactccttcccttctctaatcctgcattttatgatgtccatgaataatatttctgaatattgtccttattaattctttctaactttctttttcacattttcttcctggatttcctgtttccttcagtctcacctcaaggtcagtatgcttgcactaaaacaaagatgatgtgattgagcgttgtttgcgaatattgtcttgaattcttacagggaactgaacatatttcaggagagggatatctagaaatctagctgtgaggataaaatgtcaagggtattgggtttatcagaagagtgtgttcagatttttgtgctttgaaaaggtagtgtgagtagtcagagagcaagaaccagatggccaggttttgactgagagagaagtggagatgaaaagagcattacgaggaaagaggaggggaaaaagaattgtgttaatgtaattgaacattcagtggagacattctggctattaaacggggtaaagtgccgcaaaaatgatggagggaaagtcacaactgcctatagctttatagaagaaaccttgaattatttactgagacgaactttcagacacacacacacccacatcctttaaattttggtttcattttgtgactctgctgggtggtagaactagtgataacaaaaacagcaacgattactgctatttatatgtgccagaggcactgtagcggaacatattttgtttcagttgatcttagcaactatgaagagagatttattattttgattttttagttgaaaaagcacaagtgcagagaccattaagtaacttgcccatcttcattagtaagtaaatagtgagagaagcggcacaaaacaaaaatctgcatttaaaaagttacttattttgcatatgagccatgacaatataaagtgtgaggatttctgataggattcagaaatgagcctgttaatatcatatgtgttttacctagcagctgcctaataataatagcgattatatatatgtgtgtgtgtgtatatatatatatatatctgtgtgtgtgtgtgtgtatatatatatatatagatatatatttgctgtttataaaagcacctctttgactcaacagctagcatatgggttacactgggataagtgttaaaagagttagcccgccaaaaaagaaaataaattgaaaaaaatttatgccccctgcccattttgagtaagctgtattcattacagaaggaatcttaaagtgtttgtaataaaaatagcaaacacaaatactgcatttaaaaaatagattttcccgtttctaatctaaacattttctccacatattgtagtagaacagtatgggtaccacttaagtaattccaattaggtggcaaaatctgaaagcagttgagttttagtataaaaatttcatgaagtgttttgccttgtgtttagagaactttcatctctaacttaagcttcaagctgactcattttagtgggaagttttatcatttgtcccatagttagtcctttgcacgactggttttgctctcagtctctctaaatgaaaccctgggaaaagcttcagaagaatttgaccgtgaagccattggtatatacataattcactgagttacaggttatattaattgtaatattgttagctggtttattttagttaacttttacccagcagcaaatgccattaaatcatacttatttctaaataagtttattttccaaggaatacaaaataaaatagtcattgttttttcagtggcaaagatcatcttagctgtagtatgcaaaagtttaaagtctctcttcattccagattatgatttagtgcagtattttttttctagatagaaacattttaccattttaattgtggttttgccaagtccagttgaataggtcataaagagagtataatttattactgctttgatactggattgtttgggtgacttcattatatgaccttgggcaagatacttaacctttccatgtttattttaaccacttgttttgtgttaatagtgatgcttagctgtagtatttgtattttagtgtctccactaaacatttctattttgcagaggtttatttttattcctctcttctcccttgtcttcttcccctgccctgctctcctctgtcttcctttgcattcagtacagagtagtgagattttatttagagtgatactgactgaagactcacattttctatcttcagacatacacatctttttatttcctgttcaatgacattagcaccagagagtgaatacaaagaaattattccatgtatagatgaaaatatatgatttggttcagaattcttcttttggctaacggtcattcagagatgagagctataaatgtcatctctattctcattaacacttaggtctaaaattgagctcaatattattaatatctatgttttaattatcagttaccactgtagacttgtttttaaaacaaatgtttagaatatgtgtgatagttcctaacaacttcattaacccatttataccagaggttgcacattttttgtgtgtgaagaatcagagcttcgtgatgaccttgagcagtaggatataaataactaccacaagcttagcattccagtaatagaacactaggcataaaagggttaagaccagagtccctatgttgttaaaagttaaaatacttttatactttgccccccaaaaaatcccattgttatagtctcttttatatagtttgatggaaacatttcacattaatttctaaaatctaattcaaatagttatttctctgattacacactttaaaaagattttttacattattgtctgatttcattaagaaaaggcactatactagttgctaaaacctcatcataagatatatcactcacaaaaatagatgtaattgtatttttgaaagggttagtttcttatttttttagctaaagcttttttttataggccctagaaaatttctgaccccataaaatctatttacaaggagtttgacttatgggcaagagtttataacccaggagaatgatcgttattatttgcatttttagcttccacttttcattcctttcgcttttttaagcaactctattgttcaagagcgtatttcttattatttttctttcaaataatagtgcctagtgtttttgtaatagtctgcacaagcaagtgtaacatcttctctgttaaataacatctgctggtgtagtagtgtactcttttgaataactcattggtgggaaaaaaaatacgtgaatgcagacttgtgctgatcttcctaactcttctactgaaaatgatagttttatgctatcatgcattgataaatggtaaatgtttttttagatagcaattgtagatcaccacggttgtagatcaccacaaattctgtaaatcagctgaagatggcaaattcaacagagaagggaagaaagaataattttaaagttggccaaaatttgagtttttatagagttgccagatttagcaaataaaaatatggatgcccagttaaatttcatataaaccacaaatcatcttttagtatgtcttataataactattgggccatacttactctggcacccacccccccatctcagtaaaacgacagaaacacgtctgatttctgattacagtttgacactgttaaaaatgctatcaccttctttatctcacttcacctcataacaactatatgaattggatgacattttcccgtttcacagatcagaaaattgactttacagagatgagatgatttacttcgggtcatagctactaagtggcagaatctagggtacaaatctagtttgtctcatttcaagtttacttcacactttcctttcctctgtatcaagcttgtccaacccatggcccacagcccatggcctgcatgcagctcaggtcagctttgaatatggcccaacacaaatttgtaaacttacttaaaacattatcagctttttttcatgtttttaagctcatcaactattattagtgttagtgtattttatgtgtaggccgataattcttactcttccagtgtggcccagggaagtaaaaagattagacacccctgctctatatcttgttctgttatgtgtttgtgacatctagagatgacatgcaggttgtaatacctttttaaatttatgctttttagatccttggagcatgggggtgaagggttggattacttgtattatttggtttgcacagtgtccagagaagcagaatgtgtggtcttggagtggaaactgcatgcagctctatctcttatttggcagctgttggcgtgttccagttgtgtcttcttttgattatactaagcctgtcttgtatgggaaattgattaattctgaataaaataatgatattgcaatcagcaattaaattgtttttttgttttgttttgagatgagtctttctcttgttacccaggctggagtgcagtggcgcaatctcagctcactgctttcaagcaacctccgcctctcgggttcaagtgattctcctgccttagcctcccgagtagctgggattacaggcacttgccaccacgcccagctgatttttttttttttttttttttttttttttgaggtggagtcttgccctgtctcccaggctggagtgcagtgatgtgatctcagctcactgcaacctctacctcccaggttcaggcaattcccctgtctcagccttctgagtagctgggattacaggggtgtgccaccatgcccagctaatttttgtatttttagtagagacagggtttcgccacgttgctcaggctggtcttgaactcctgacctcagatgatccacccgcctcggcctcccaaagtgctgggattacaggcgtgataaactgtttttaaagcagtctcatgatggctttatttgcaagggggctattggtatgtattgttccctatgattatcaatacatttggaattcacatagttaaacaaacttatggtttcatgtagcaatgtttgggatttcttcatagcatttttttttttttttgctctaattcttaggtgagattggctagtctgtcaccatttgtagcctgttgtatgagatgttcctatagtatggactagttcattcatttgtgttgtcctatttatcaacattttctgccttgctcaagaaatgctctataacgcaacttgtatttcagatattgggtaatttgattattttataagatcctttagaacagtgcttctcaaacttaagtgtcatacaaattggatgggagcttgttaaaatagagttcttatttgatggatttggttggggcctgaatttttctacctttcgaaaagctcccagttggtactgatactgttggtctgttgagcgtgctttgactcacaagattttagtgagttaacgtttttcaaatagatttttctccttttttaaaaaattcacaaacatttaacaatatctctgttgatttatttatactagctcatatttgaacttgttataaaaatcgacctttccttgggtttaggatatcaaggtgaccgttttgcctttgttaaaggacgtctgaggttttctattggcatgggtacaagagtcaggttaagatttcaggatgttagagcaaaagcactgttttcactggcacctgttgccttgttgctttaaatgtataaaagcatattgaacagtggaacaaagtgacaagaaatttagggtgaggcaactggagaaaagagtcacaaacttcagaactattgagttggcttcttgggtatggcttatgctttcacagaaaccttccttccaacctctagtttctgttgtccatgtatgtggctttgaggtctcagaatttgagattgtgctttgggagaaacagacaaggaaatcagtggccttcactggcagctggcagacctgtaagtgatgtggtttaattgtgtgtacgtcaggattgctctgtctttaagacggtctttttaagctgcagtgtttatccactgttggcattttctttgttggtgaagttgtattcttttgttttaatcttccagctcttgtctgggttgtcaaatgtttgagcatgatagcaaagatctcaaaactagttctttttgcaagcagatctcatctttaaggtgtagtgtaatgggattcagaaacttgactcctgtcataggcaggagggaaatgtgtgtttaatttttctttacttcgctttccttcattaatatgggattgttattattattttctggtgtgtttgggatagttgctgtcaatggctacaaaagacagttttaagattctttagctagggctgggcatggtggctcacgcctgtaatcccagcattttgggaggccgaggcagatggatcacgaggtcaagaggtaaagaccagcctggccaacatggtgaaaccccgtctctactaaaaaatacaaaaattagttgggtgtggtggcatgcgcctgtagtcccagctactcaggaggctgaggcaggagagtctcttgaacccgggaggtagaggttgcagtgagctgagattgtgccatgcctagcaacagagtgagactgtgtctcaaaaaaaaaaaaaaatgtagctagctgtttggcctaggtattacaaatttcaatgtttgttattgtaagtttctatattcaaaaatcacttaagtatgttacacaactattttgaaactgttagtgaaaaataatccccttcaaatgcaatcttttaaattgatatatatatatatattttgagacagagtttcgctcttattgcccagactggagtgcaatggcacaatctcggcttaccgcaacctccgcctcctgttttcaagcgattctcctgcctcagcctctggagtagctaggattacaggcgtgcacccccatgcccggctaattttgtatttttaggagagacagggtttctccattgttggtcaggctggtctcgaattcccatctcaggtgatccacccgcctcggcctcccaaagtgctgggattacaggcgtgagccaccgtgcccggcctaagttgagatgttaaaaggaaagtactttgcagatgactttccaagaaaactagaaggaacaattggcttggggaagtgatcataatgatataacttggatataatcagaactttttgtcttttttctgagatggagtttcgcttttgtcacccaggctggagtgcaatggcgcaatcttggctcactgcaacctctgcctccagggttcaagtgattcttttgcctcagcctctctagtagctgggattacaggcactcaccaccacgcccagctaatttttttttttttttgtattttcagtagagacatggtttcgtcatgttggccaggctggtcttaaactcctgatctgaggtgatccaccatccttggcctcccaaagtgctgggattacaggtgtgagcctctgtgtccggccataatcagttctatacaatgtgttgtgagaggaaaattcaccacaggctctttaccttatttaaggaggtcaattaaatataaaccatagtagcttgcttattgtcattattagtttattgatgcaacagtagagtaagttgattctttcctacattactgcaaaagctatctaatgcttcctcctgtccactctcattatgtttccctttcagcttgttccaaattttgggaaatctgattatatcacttccttatataagtcctatatactttgggtaagctacgcattccttgcttagcatataattgtttggctttgcttacctttagctttctttttctctactctctcctccaactttaagctatagtcattctgaaccatgaggttttccccaagataacacattctccttttcctcaggtttttgttcgtagttcttctctgcctagtactggatcacctgcctagtaacttggacttaatcccttaggaaagttcagatactgtttttccaggaagcctttcctgatcatcaccaccacctccacctccagactagcttagggctctttcctgtccactctaatagcacttgttatatactgtatttccttagatgcctgggaagtatttgagagcacgaacaatttttattcatgaaattgttgcaggaatttttcttagttcagctaaagacggggtccttgtcacacagccacgaaaatttaggcttgtgtacgattcgaacgttgagtaggacagggttttattgggtgaaaaggaaaagggggaaacagggcctctctgcaggccagattccttgctagagtgcttcccgccttgcagattgactcccaggttacacccgtgaaaaggaggggccaggctcctccctgctgcacaaggtgcagatttctgtagctccatcccagtgtgctctcctcccagggcaccgctggctggagtttctctggggaccccttcctacctggctttctcaaaattgtatcctcagtgtttgatatataatggtagtatttaatgaaatatttgtctatttaatgagtagtgaatatgtaaaaaacttagcaggctgtcaaagcttagataaatgtgatcctcttacatcccagagcctattttctcctgggcaatgcctaaagcttattttttagttgtctagtaatcccgattctgccctttgtgaggttagtcttcttcacctttacctgtaacctagcatttagtctagttttctgacctaccggtattttttttctagatgtaaaattatttcctgactctttctgcctaaatcttttggcttccattttgactattcacataaagagggaaaaaccccatagtgtcttacatttatttagtacctagtagcttaaagtgcactttcacattcaccatctaatgtgagtgaagagacagattctgtggaagaactaaactcatctggtcatactcatcatttcaagtgggaagaaagtggtagctttgaaaaggaagagtgcgtagaaatactgttgtagagtcgaaacttgctttcagaggagttgagttttaagaccgggtgcggtggctcatgcctgtaatgccagcactttgggaggtcgaggtgggcggatcactcaagcttaggagtttgagactagcagggccaacatggtgaaaccccatctctactaaaaatacagaaactgcctggttgtggtggtgggcacctgtggtcttagctacttgggaggctgaggcaggagaatctcatgaacccaggaggcagaggttgcagtgagccgagatcactgccactgcactccaccctaggcgacatagcaagactccatctcaaaaaaaaaaaaaaaaaattgccacgcatggtggtgcatgcctataatcccagctactcgggaggcagaggcacaagagtcacttgaacccaggaggcggaggttgcagtgagccgagatcacgccactgcactcagccttggtgacagaatgagactctgtctccaaaaaaaaagaaaaaaaataaggaaaagttgagtttttaaaaaaggaaatgaatccatatgagaatgccagggtacttacatcattggatatgctgcacttttggaaagaaaaaagacactgaaagatgaaatttcctaagaacagaggaatacatgctgttaaccatggtaatagaatcctggtaaggtaacaactctgtagagcagtgggtttctgccttctgatttatgtactatgtacaccatcttcatttcatatttggtatcagagatctcccaggtaaacagtatttgcttataatttctatagtagagaggttaaaagtatcgtagttacagtcagacagacctgagtttgagtactagttctaggatgtttaaaactgattttgggtaatgatttaattttattgaaggtttgctcttttcatttttagtgtggagttaataaaacctcataaaacattttgaataagatgataaatatgctgtgataaacattaaggtccttggtatataataagtacttgtaagggttattatggtattatatttagcatagcgctagagttagatataaacatataacacataacttcaatagtatcctccttccctccactccccgcctcccggcctcccctcaaagagtgaagaagaagcatattccatgtttgtttggatcttaatgaaagggcaaatttagatatttaaatttatatattaacatataaaacataaatatgcgtgtgtgtatacatacacacacacacacacacacacacacacacacacacatatgtttggggtgaggagaaaaaggatatgttagtaacctcttgcagtgtgccaaatcttacgctaagcattttccatgcattattttatttacttctcacagttctataagagatgggcattattcccatgtcataaataaaaaagataagaacactctgaagcttagagaggctaaagatcatatagataatgaatagtgaaccagcatttaacctagagctctttagcccttaaaacttttgcttttaaccactctaccatttgtattcctgttaggagtctcctcacatcccttgggagaccttgaacatattctgagatttacaagttaccatgttaattttatgattttgtattttcatttcaatgacaataaaaaagtttatatacatattctggatcacctgggtgactgtcttacaatgaaataccctatgtagtttcatttatatttatggatatcatctcattgtcttcaggtattactgttataattgtcatgggccaatgagaaaagaacagtggtgggcctaatccatactgttgctttttatccaagcagagttcaaatgatgtcataatgtactataagcagcaaactttttttaaaaagtaatttgacaaaatttctgagacagttggatcatcttacagctcaaaacaaaacaacttggacaatagtaataagtaccatgagtgcactgtgagcagcaatttaacagcatattcaattaatactggtactttgcactatgtcttttggtttgaattgcattcaatttgggaactctagatctaatatttgcattttttacagtattacaatttatcagtggatctagaaaatattttcttttataattatactatattatactatcatctagatacagaccctttagctcatggagatgaaggaatcagttctgtttaggggagtgctggaaagctttgccaagatactgccatttaagcttcttcttgcagaatgagtgcatgtatgctcttatgctcggcaaagacagggtaagggaaagggcagggacatgaagacatctgaaaaggcaaaaaaacaaaagaatcttttcctcatgcttactgcatgagggaatattaaaaatataggttattgttaaagacctttagtgctaattaagggaatatggattttattacgtaattagtgtgaatccaaaaaaagcaaaaagtgtgggaatataaacaacttttataattcaattgtgtgcatatggaatctttgtaaattaagtcatgttttacataaaaccagaatcttattggttaaagactatttggaaatggaatgtaaatgtttttgtatgaaaataaattgtccccaaattttcagatttacaagttaccttttttttggtctccccctctccttccttctttccgttcttttcctctaggcgcatcctttaataatgaaatcagaaactcgtaactttattcttctctcccatctcactgggatattttagcgattaatagtattctacccatttgatttaatgatttttattttattttaactaacatttattgagaaaactacatatgagattttctgatcactaatatttatttgcacagaaaaaggtgttactatcatttacttaatagatctgcttttattaatgattttatgccttgatttcccacagttagcctccagctgttacttctgtattatgcatgttagagtgaaatgtccaaattaaattagtttttaagctgagccctgtgaaatcaccaggtggagaaatacggatggcatattattcctgcatatgcattttcatatgctattggtgcagtgtaattcaactgtagcattcacaactttcatcattgacatagccttggtggggtcggggaggagggatggggggtggggggcggggggagtaaatggaatgatatgtacaaaaacacttttcagctgggaagagtgaaacaagttaataggaaataaaaggccatattgtctattcagactagtacgttacttttccagagtcatggggctagcaaccactatatgtctgacttctaccaagaagggttgaatccctggttgatcctgtgaggcctgaggcatataaacaagaaacatgaaagggagaggaaaattaaatgaagtgggagtgttgcagaataataatacaattaagggagaaaataatagaggtagaggaagaggttatatacacttatttctcttactatgaacattttacttagaagtgtaaggttgtatgtcttgtttgatacagtgataaaaattatgataatgcttaacagaaatgggtgctttgctccataaaagtgctccgtgctttcctctgtcattatgaattaatcagcaagaaatccagaagtgaacaacataaaagtattccctctcctcctttttttaaacagtgaaaaaagttgacaatatatttattctgtcatagatccaaaaagccaagcctgcgttttaaggcagggttttctttggttttctatttctcagccacaccttcagatttcttggcacagtacagtcatagcattgtgtcatatccttggtctgttttatcagactttataaattgattctgactgtaccagcagtactagattcttatctttacacagtttgggaaatggacaatgactcttttggaaaaacagctctataaattgtgctgtggtatgtgagaatgggttctctgctttgcttttcctctagcctgctgccattcctagacagtgtcatttctctgatttagggcattgtgtagctgttctgggtagagtaaacctgcctctaaatgtggaacagattgttacccgtcagaattctccaccttggaatggtgacactgaaagatacaattcagctctggccaacacctcctgtcttcccagttcacttactctcgtctccactccaattattgcatctaattaggaccttgaaacaacaacctactacttttttttgtttgttttgaacctcgtatggcctcacacttccttccttacccgggtcagatttcatggtccagcagtataattactcccttctaaatccccttgacttacttgcttttctcttttgtcacacttgcttgcaaaacctcaatcctgatttaaagcaagtgtcttcctacactgcctctgccctgagcagctttatgttaccgggcaagaagagtcacaaagctttgcagactggtctcacattgaatttatggccacagatctcaaattgctcctaattctgcaggcagtcctaattaagaggactattagatttgatttcccatcctcagaggtgactgtatcattctgttctcttatcaaatctgcaaatccttcgcctccactcaaagtttctggcttcacttgatatttctttgagaaaattaaaataattggatgctacccagtttgtctcctcatcaaatctaccagcctacttgcatctatacctggagcctttgcctgaatagtgccactattcctgaattcacctctgctgccttttctgttaatcctatcccagttgcccaacctaaagatgcttctccctcattatccttctccctcctttcaaatttttgctttctccttgttcacaagtgtactaacctgcctttagagttccacttaatgtcttaaaaaaaatcgttctcttgatgtgatgtcttattctagttgccaccctgtttctctcttcccttctcagcaaatcttatttaaaaaattgactgtagttgctatctgcctttccttacctttcttcaagtttgtttaatcaggctcctatttttagtagtcttacgaaactgctcttgtcaagttatcataaatatccatgttaccaaatacagaaatcacttccatggccccatcttaactttacctttcagcatcattctacacatttccttccttgaaacactgttttcttctggtatctctgataccagtgtctccttattttctccctctttcacctgtcattccttttgtggtgtttctgattctgccactttcctctagacctctaaaaggctccactctcagtcctattctcatatatatatatatacacacacacacacacacacacatatatatatatattctcagacttttcttttttttgagatggagtctcactctgtcgcccaggctggagggtaatggtgccatctcagctcactgcaacctctgcctcccaggttcaagcaattctcctgcctcagcctcctgagtagctgggattacaggcatgcaccaccacgcctggctaatttttatatttttagtggagacaggatttcaccatattggccaggctggtcttgaactactgacctcaggtgatccacccgccttggcctcccaaagtgctggaattacaggcatgagccaccatgcctggcctcagacttcttcaagtctaaggcattcattatcaaaaacacagcaatagctaccaaattaataatatacaaggtgctccagaatactctacttattacctacacaatgtctttagttaaatatcaaatttagttttactcagaacagatctcttgatctggcccacctttttcaaaacctcttcttccccagtttcccaccctcaataaatggtactaccattcactcattgtgcaggcaataaatcaccaagcaatccttgatttttcttactccctacgttaaatctattagtaagcccgatcacacctcaaaaatgtatctttaattcaatgattccattcgattctctctatgaaccattatccgttgctcaaattactgcagctgttttccaatggctatctgcttctatatcacttctgtactagtcccatctctgtagcaatcagactgaactctctttttttttttttcttttttgagacagggtctcactgttacccgggctagagtagcctggcgtaatctcggctcactgcaacctctgcctcccaggctcaagccatcctcccacctcagcctcccaagtagctgggactacaggtgcacaccaaccatgcctggctaatttttgtgttttttgtagagacagggttttgccaaagagcagggagtacaggcatgagccaccgcacctggcctgaactgaactcttagacattgtcaccccttgggttaaaaccttcctgtgttctcccatcatacacagtgaaacccaagctccttccacagcttaggctctgtatcctatggcttcttgccacccctgtaaccccaccacaacctccccttccatatactccacctatcagcttttttgttgttgttaaaacaagctaagcattttctatcctcaaagcctttgtagttatgattctctgtgcctcttctcctagatcattatatgtctcttccctgaccattgtagctgaaatacactgtttgtcacatccagtgtctccattacattgcttgttttaatttttttcttagcacatgtcactgtgctatgacatacttttttgttagtttatgttcccgcctcccccttttaaaaataagttcaatatgtttgttgagggtggggacattgtattcttttttcttccttagctgtatttaactcttggcaggcattcagtaaatatttgctgaatagatgtgcgagggctggctcttttctgaaaaagttgacagttgagaatgcatgctagttttaaattatggacaaatatgtggctttacatcagttgagagaaacttgaatgtttattaggttactgttatttttatttgtgtttttgagcaattcttttgtactttgtgataacaagtaattgcttccaaatgaaaaagacttttccagtgacctgcaaagctcttcagcagggattggcaaactacagctcatctggcacctatttttgtaaaacctgcaagctaagaatgggttttacatttttcaagggtaacaaaaaagaaaaatatatgagacagattttacatgattcacaaaatgtgaaatatttgctctctgatcctttacaagggaagtttgctaacccttgctggaggcggtggccctcattacctgccttcctcattagtggcctgctgcatctgtctgcttcacctgggcctcgtgcccattcgcatttgctgtttccttcgtgaggaacactcaggctcactcccttacttccttcacatctttgcttagctgttgcctttgcagtggagcctttcctgagcacttaatttaaattccaatcccgccacccattcctacacaccttatctcctttcttcttttatttttcccattggacttatcactgtctgacataccatgtatttttcttatgttctctttctttccagtggacagtaaactcagtgagggctgagatttttgtccgttttgttcacggccatattttcgaagatagcacctggcccatagaagcttttattaaatatttgttgaattaatggtcatagattaaagttatcttgagaaccagcattaaaaaaagtcaaaacacttcagtaaacattgattaattgccataaaacagtcctcatctcagatctatggagttgtataaaatcgggtccttgtcttcaaagaaattagtgtagtagtgagaataagcatagaaataaaagacactaaatgtaagatgagactaattatcctgcagtttccttgctgattaaaaaaatgttgaattgatcatttaaagtatttttgcagaagttaaaagtgtttatgtaaaactccaagtaattaacacttttacgttctgtattgatatcttttctccttttcatcatgacttgttttctttagacagttaggaatatggttccgtgaaaataaaacccatatttaaaatggcttttaaatagtcaaaagcattttaattagataaataacaagtgaaactattagcattttatttttagttttttggttactctttgggcaggtattttttaaagcacaattagatatttaagtagtattataaaattttatgtcttaatttttatgttaactgtgagtggagctctttggaagaaggtaaaatgagagagagtgtgtgtatgtgtgtgcacgtgtgcaatatatatagtcatgagtcattgaataattgggatgataggttctgagaaacatcactatgtggtatcattgtacaaatatcatagcgtatactaacacaaacatagatggtctagcctactgcacagccaggctgtaaggtatagactgttgctcctaggctataatcctgtacagcatgttaccgtactgaatactgtaggcagcattacacagtggcatttgtgtacctaaacatgtaaacatcagtaacaatccagtattataatcttatatgcatctgcatacaagatgcagtctattattgaccaaagcattatcatcatgtgctgtaggactattatgagtgtacatattctctttttttttttttcttttttgaggagacagggtctcgctctgtcacccagactggagagcagtggcgcgatcttggctcactgcaacctccgtttcctgggttcaagcaattcttgtgcctcagactcctgagtagctgggattacaggtgccaccatgcccagctaatttttgtatttttggcagatacggggttttgaggctggtctcaaactcctgatctcaagtgatccacccatcttgtccccccaaagtgctgggattacaggcgtgagccaccacacctggcccatattctctatatgtaacattttataaatattatagatgtttatatgtaatatacacagtgctttagcaatgtcattttatttttaattattgtctatttaagccctagcttaagcttctcttcttgagtgaaaacacaaataccttagtgaaatttgattgataatattttttttaatttgacaatagaagcatcctattttttcttaaatttgtgtgggagattttatggtatagtaacgtataacactaactatatgtaacttcctttttggtaaagcaaaacagccagtagaattgtagcctctggcaaatgttgttagtttcttaataggaaggagtaagttaaagacagataataaaaattcctttaccaattaattttgctaggtgtttaagatacaaggaagatatttattttttagtaattccattgttttagagcttcaaacaaactgtattttccctcagagttttgttttgggtggatttgtcagtagggtatgattagtttcctttttacgcatttgttcaacaaatgtttaatgagcacctataaaccacaaggaactgtactaggaattgtggattttgaaaatatatcagaggaggactttaacctctaggaaggcatgttcataaagtacagtaaaacaggtatgtagactccctccctaatgtggagaacaagtcaacatgtcataagatagattcagttaaagtggtatgggagttaggagcatccataatagttgtgatctaatagatttacctaaatttgagtttggattttaagagacagaggcttagagcagcaataacaaagtaaatatgggcaaagcctgcctggcatagtctgcattgactgttgtttcttaacattgtgcatttagtgtgtattcatatcccctgggaacctcgttaaagtgcagattctgatttaataggtctggcgtcaacctgagattgggtgtttctaccaaacactaaggtgatattcatgatataagttcatggatcacactttagatagcaagatggtggaccacattttgtaaaacttctggtggcagagacaagtaaaaattcaactactattttctttcccatcttcgtttttctgtcttcttacacttttgtttgcttacatctgtgtgctggtggagagagttaaatcttttattcatcatttcactgtttattataatagttgggagcttagcaattgtgaatctaattttaaagcattaatttatttatgaattgctctaatttgtcctcttcctgcttgaagaatggtaaaacatctatgttcactatgaattaaattcagattagttcaggcaaaacagcagttgagagagttttaataaatttactaaaccattaaatccatggcacctcacgataggaatttactaacatctgggttttcttgagaatttagattcaaatcaaactagatgttaatctacttataaggaaaaagaaggaaattcctcatttcacaagttctgttatgtctcagaatgttttttcctaaatatacattccagaaataccctccttttactcttttaacttatatttagatgatactccctcttatatctcttcccagagaaacagtattgaaaaggataataatgaggcaagaaaatcattgtgtgttttcatcttttccagttaattcatgaattcagaactatgcatacattcataaaaccatgtgcatgcacacacacacgtacacagacagacacgcatacacaggacgagaaggtgggggtaggcaagagattgatttaattgtctcacaattttctatacttttcttggttgcctatcatagataaaaccattttatcttgatagtcatcctttagcctatagagtgaaggtgaagaaataatagtggtgaaactaaagataggagatttaaaatatgaaaagaaaatggattaagaaaatcaaagaccaaaaacttaaaagaatcaaagaccaaaaaaatgtgccatactgtactactttgtatatctagtctgatataggcaaacaacctattttgagatacaaccatatctctttttagaaacaacttttaaagaaaattttaaaatattttatgtctgaagtagaaaatttagaaactgtaaaaaaatgataaaaaagaaaaaaaaataggctgggcgctgtagctcactcctgtgatcccagcactttgggaggctgaggctggaggattgcttaagcccaggagtttgagaccagcctgggcaacatagtgagacctcatctctacaaaaaataaacagcaataacaaaattagccaggcatggtggcatacgtctatagtcccggctacttgggaggctgacataggacgatcatttgagcctgggaaatgagctatgattgtgccactgcagtttagcctaggtgagtaagtgagaccttgtctaaaaagaaagaaagaaagaaaagaaaagaaaatgaattttcaaaaaacaaaaagaaaaaaacatgcttaatttgtccatcttaatattcttcattatatgtgtgtatatacatacatttgggatcatgctctgtattccttagttagcattttattatgtctttttggagttgatggaggtagtcattagtatgtctgtgagccaggtggaatgctcacacctgtaatctcagcaactcaggagtctgagacgagaggatcacttggggccaggagttcaagaccagcctgggcaacatagcaaggtgctgtctctacaaaaattagctgagcatggtgatgtgtgcctatagtcccagctacttgggaggctgaggcaggaggatcaattgagcccaggagttcaaggctgtagtgagctatgatcacgccactctactacagccaggacaacaaaatgaggctgtctcttacacacacacacacacacacacacacacacacacacacacacacggagtggttgattggataggatgagggtaatgaatttcttgaattgttttttctgaaacacgactaaaaacaccataacctagttttatgatttgtaggtaaagtaggatttttaaaatcacttactcttcgatataattgtgatggaaagtgctgaggaatgaaattggctttgattggattaaatatctaccttctaaccaaaacatagtctagtagttttaattcagttatttattccacatgtcataatgccccaaataaccaggctactgctattggcattaaaggttgccagcaccatctggaataattcacaaatgcaaggtgaaaggaatttctgcaccatttaaatttttttctctctcttaaaacagagcaaaatttttgcatctagtaaatgaatgttaggaggaacttaattttgagaaaaagcaatttgattcataaaaacagaatttttctccatttgtttgtcttctctaatgccaggagccagtctgctttttccattagttaatataattgatatcagattgttaaaatgagaaataaaaaattatagagtaaggagaataaatataaacattatttttctttttatttcctctagtgataactgattttattatattgtctgtggctgaattcttctgtagatattgaagatggccaaaaatggagatctaaaatgtaacttcttagtgtgcattttcaatggagaatgaattatctcatcatctgtgtcattaattcatgattttatcttgaataatttttcccagctttattgagctataaattgataaaatagcatgcatttaagtacggtgtaccacatgatctgatacatgtatacattgtgaaggattagcacaatcaagctaattaacacctttatcacctcacatagttaccacttgttgtgtgtgttgttagaacccttaagatctgctcttagcaaatttcaagtgcgccgaacagtattattaattatagtctaccatgctgtacactggatcttcagaacttactcatcttctgtaactgaaagtttatgccctttgacaaacatcttccacgatctccccctttcccaaccctctagaaaccaccgttctactttctctgagttctgtgaatttgatgtttttaggttcattcatatcacaagtggcagtatttcccttttgttcttgtttcgaaacagtctcactctgtcacccaggctggagtgcagtggcgtagtctcggctcactgcagcctccacctcctgagctcaagcaatttttctgcctcagcctcttgagtagctgggattacaggtgtgtaccaccaggcctggctaatttttctgtttttagtagagatggggttgcgccatgttggccaggctggcctcaaacttctggcctcaagtgatccacctgcctcggcctcccaaagtgttgggattacaggcgtgagccactgtgcctggcctcctttttgttttatggctgataaatattccatttgattatatatgccacattttctttatccattcatctgatgcacacttatgttgtttcacattttggctatcgtgactaatactgcagtgatatgggagtgcagatcctgatttcagttgtttttgatgtgtagcagaagtgacattgctgagtcatatggtagttctgtttctaatgtttagaggaaccttcttaccgttttccataatggctgtgccagtttacactcccaccaacagtgtaccaggattctcttttctccacatccttgccaatacttgttatcttttgtctttttcatagtatccattctaactggtatgaggtgatatctcattgtggttttgatttgcatcttcctgtgatgttgagcgtattttcacatttagctatcctttggcctgttgagcatttttccatatacctggtgaccatttggccatttaaagtcttctttcgagaaatgtctattcagatcctttgcccattttaaaatcaggttgttttcttgctattgagttatctagacattttgaatattaactccttatcagataggtttgcaagcattttttcccattctttaagttgtctctttactctgttgattgcttgcattgctgtgcagaagccttttagtttgacgcagtcccatttgtctattcttgcttttgttgcctgtgcttttggggtcatgtccaaaaaatcattgtgcagacccacatcaggaagttttctttccccagtgttttcttctactagttttaaagttttaggtcttatgtttaagtctaatccattttgagtcaatttctgtgtatggtcagggataagggtccaatttcattctcctgcatgtagatatccagtttccccaacaccatttattgaagagattatactttccccaatgtgtgttcttggcatctttatcaaagaccaattaactgtaaatgcatgcatttatttctgggttttctattctgttccattggtatagatgtctgttttcatgctggtaccatagtgtttagatttgtaacatagtttgaaatccgaaagtgtgatgactccagctttgttcttcttactcacaattggctattcacggtcttttatggttccatacgaagtttaggattcttttttctgtttttgtgaaacaatgccattggtattttgatagaggctgcattgaatccatagattgctttgagtagtatggacattttaacaacattaattgtttcaattcatgaacagattatctttccatttgtatgtatctttttcaattcctttgtcttctagtttttagtgtacaaatctttcagccagttgtatacaaaaatatacaactaatttttgtatattttatattctgcaactttactgaacttactataatagtttttaacaatttttttatgcaggctttagggttttctatgtatgaggtcatgtcatttgcaaatagagacagtttatcttgtattttccagtttgtgtgccatttagttctttttcttgcctaattgactaggacttcgaatattctgttgaagaggtggtgagagtggactcccttttcttgttcctgatgttaggggaaaagctttcaacttttcaccgttagatttatcggctgtgggctaatcatatatggcctttattgttgtgttgaggtacattccttctttacctaatttattgagagtctttatcatgaaaggatatttaattttgtcaaatactttttcagatgattgtgtgatttttatcgttcattctgttagtgtggtgtatgacgtttattaatttgtgtattttgaactatccttgcaaataaccacttgattatagtgaatggtccttttaatgtgctgttgaattcagtttcctagtattttgttgaaagttttgcgtctagtttcatcagtactattgacctgtaattttcttttcttatagtatccttatctggccttggtataagggcaatactggccttttaaaatgagtttggaagtgttcctgcctctttaattctttggatgaatttgagaagaattggtactagcttgtgcttaagtgtttggtggaaatcagctatgaagccatctggtcctcagcttttctttgttgggaggtttttgactactgctttagtcttctttcttgttattggtctgttcagctattaatatgtcttcacttgtccaggtacagtgtgtaatcccagcattttgggaggccaaggtgggaggatcacttgagaccaggagttggagaccaaactgggtaacatagcaagactggtctctacaaaaaaataaaaaattaactagttgcagcggtgcatgcctgtggttgcagcaacttgagaggctgaggcaggaggatcctttgaccccagaattttgatgaactatgatggtgtcactgtgccccagcctggacaacaaagcaagaatgaatctcttttaaaaaaaaagtcttcaattttgttgttgttgttgttttaatgattcagtctttagggtatatgtttctagaaatttattcatttcttctaggttatccaagttgttggtgtattaattttcataatattctccttgtactcctgtggatcagttgtaatgtcttctctttcatgtctgattttctttatttgaattctctttctcagttattctagctcaaagcttgtcaattttgattatcttttgacaaacaactattatgttgattttttagaattttctttctggtctcccatttatttctttattatttccttactttagctaactttgggcttaggttgttcttttttctatttttttgaggtgtaaggttaagttgtttgagatctttattttcttaaagtttattgccataaacttgtctctttgaactgctttgctgtattctgtaggttttagaatgctgtgttttcattttatttgcctgaagatactttttgactcttttttttttttttttttttgagttggagtctcactgtgtcacccaggctagagtgcaatggcacaatcttggctcactgcaaccaccgcctcccgggttcaagcgattctcctgcctcagcctcctgagtagctgggattacaggcatgtgccaccacgcctggctaattcttaatacagatggggtttcaccatgttggccaggctagtctcaaacccctgacctcaagtgatccgcccacctcagtctcccaaagtgctgggattaaaggcgtgagccaccgcgcttggcctgactttttgactctccttttgatttcttctttgacccattggttttgtcaggagtatattgtttactttccatgtatttgtgaatttttaaatttccctcctattattgatttctaattttataccattgtagttgaaaaacatgcttgatatgattttaacatagttggatttaacacttaattttgtggcctaacatatgttatattctggggaatgctctatgtgtacttgagaaggatatgttttctgctgctgttggatggatgtttcatatagtctgttatttgctctatactcttattcaggtctaatgttttcttattgacagactgtttgacctatccattgttaaaagtggggtagtaaagtcctctcttgttattgtattgctgtctgtttctcccttcagttctgttagtatttgctttatatttttaggtgctctaaggttggatgcatatatattaatacatttacaattgtaatattctcttgatgaattgacccatttattgttgtataataaccttgtctcttgtgactgaaagtctattgtgtctgatataagtaagcccatttctattcttttttggttaccatttccatggaatatctttttctatccttttgttttcagcctgtgtgtgtccttacagctaaagtgagtctcttgtagccaacatattgttggatacttaaaaaagtctgttagccactctgtatcttttgattggagaatttaatccatttaaagtaattattgatagttaaggccattttgttgttctctgttttgtaggtcctttgttcctttctctcttgctgccttcctttctgatttgatttttttttttgtaattgtatgcttaattcctttctatcttttatatgttactggaggttagttttctttgtggttactatgagggttacataagatatcttaggctgttttaaggttgtaataactaaactttaattacctacaaaaattctgcaattttatgtctccctccttcacagtttatgctattgatgtcacactttacatctttttatatttgtgtacccattgacaaattattgtagctatagttatttttatacttttgtcttttaacttttatgctagttaaaattgatttatgtaccacgattacagcattgcagtattctgaatttgactgtatatttatttttaccagtgagttttatactttaatgtgttttcatgtttttatttagtgtcctttagtttcaactcagctccctttagcatttcttataaggcaggtctagtgcgatgaactctgtcagcttttgtttgtctggaaatgtctttatctcatctttatttctgaagaacaactttttttttttttccctctgatggcacctctgactccttgatattgtattatttgtttctcagagaagtaaagcaattttttttttgagacggagtctcgctctgttgcccaggcaggagtgcagtggcatgttcttggctcactgcaatctctgcctcccgggttctagcgattctcctgcctccgcctcccaagtagctgggactacaggcgcccgccaccacgcccagctaatttttgtatttttagtagagatggggtttcactgtgttagccaggatagtcttcgatctcctgacctcatgatccacccacctcagcctcctaaagtgctgggattacaggcatgaaccactgtgcccagcaacaactttcttatgtataatattcttggctggcagtttttgtctattagcactttgactatatcatctcattccctcctgatctgcaaggtttctgctgagaaatccactgattgccttggtggtggtggtaatggtggtgtgtatgtgtgttgcgggtttccttgtattataggttgcttttctcctgctgctttcaaaatttcctctttgcctttgatttttcagaattcaattataatgtgtttcagtgtaattttctttgacttgagcttttgagcttcatgaatctagatgtctgtatttctttcaagatttgagagattctcaggcaacagacattcatttacgtgagctaggtatttcttctattctcctgttgggaccttggtaatgcacatgctcattcatttaatgctgcatcggagcttctgtatgcttttgtcgtttttaattcacttttctctttagtttctctaactggataattttaaacgatgtgtgtttgagttccctgatgctttcttctgcataactgagtttcctattgaagctattaattttttttttcagttgtcagtgtattcttcagtttcaagatttctgtttggttctttagagtttctattcctttattaaactgtttgttttgttcatgtattgttttcctaatttttgttgagtttcctgatttttgtttctgggttctcttgagtctcattgagcttctttaggatgattatctttaatgccatcagtcatttcatgtatctccattcctttgtgatcagtcataagggctttattggtttacttcggtgatgtgttatataactgtaaaccgaatacatggaaaaataaaaaaaaaacaatagaaaaataattagaattagcaagagcgtttaacaggttttctagatagaatacccatataggggaatcatgttcctgtttatatgccagcaaatagccactagaaaatgtaattttaaaaagttactaaaataatttattcaggaaaagttcattagtgcatggagccattaggtgaaaggttgataaaaggtgaactctacacacagaagagaccaggctgtcactgccttgatgcactagttaatcttagcctctttaagagtgagaaaaccaaggaccaggcacagtggctcatgcctgtaatcccagcactttgggaggctgaggcgggtgggtcacttgaggccaggagtttgagaccagcttggcccacatggtgaaaccccttctctactaaaaatacaaaaattagccaggtgtggtgttgcatgcctgtaatcctagctacttgggaggctgagacaccagaatggcttgaacccaagaggtggaggttgcagtcagccaacattgcgccactgcactccagcctgggcaacagagtgagaccctgtctcaaaaaaaaaaaaaaaaaaaaaaagagtaagaaaaccagacattatattatatgctgtcagatgtgaggcaatgtcagttatacaacaccattaattattatttttacctaaaaatgaaaattgaatatattcaagtctttaaagctaatattcagtatcaaaacaaacaaaaagcaagagatatagagaaacaagttgaatttcatcatgaagaagcaaacatacaatccagaatgtgagtcgttgtatggaataattgatttcctttttaaaaaaatcactggcattcaaaaagggtacattggaggaggtaagagacttttctctagattagtagggatttgaaggatctgacaataagcacaatgtatgggcgttttttgtattttgattcaaataaagtagccgtaagaaataaactttgattcaaatggggaaatttgaatatggactatatattatactgatattgaggaattgttaattttgttacaatttacgttgttaaacatgctcttttttggagatgcatcaggaagcatgtataagggtataatgacatgatatctggaattttaaatgatggcaaaacgtataatgtacatagaaataaaatatatacacattttttatggaggaaaatataatgctttgttagccttttaaggagacctaaacaaatagataaacacactgaccagttttcaacctaacgatagtgcaaaagtgatacacgttcagtaaaaccacactttgaattttgatcttttcctgtgctattggtatgtaatatgatactctcttgtgatgctggacagtggcagtgagccacagatcccagttagccacacaaccaggagagtaaacaactgctactttccagattaggtgttttaaatgcattttggacttaggatattttcaacttatggtgggtttattgggatatagcccaatggtaagttgaggagcatctgtagtatgttaatgaattgaaagatccaaaagcatgaagtttttcccaaactgacattgcttcaatgtgattggaatcaaaatcccagaggctgctgttgggttttttgttgctgtagttggttggttggtttggtggaacttgacgggctagttctgaaatttctatgagaagcgtaaagcgccaagaacagccaagagagttttgaagaagaaaaaggtagggagccttgccttgctaattactttttgtaaaggtatagtaattaaggtggtatagatctggcacagaaatatacaaacatagccacaaaacaggtacacatgcatatagaaactttgtacacaccagaagtggcaatgcatgtaaatattcctgggaaaattcattataaatacatgtaaaaaatgaaatattattatgttataccaaaccccccaaaatggaagtatgtttttacctcataacatatgcaacctcggtttcagatggattaatgactgcaacgtgaaagacaaagttaacgtcgttttaggggaatatctttatgaactttgatggacaagattttgtggaaatgtcacaaaattgtatattataaaggagaagattgatacatttgaaacaattaaaagttttaggctggacatggtgactcatgcctgtaatcccaacactgggaggcagaggccagtggattgcttgagtccaggagttcaagaccagcataggcaacatagtgaaacctcatctctactacaaattagctgggtgtggtggcatgtgcctgtaattccagctgttcaggaggctgaggtgggagaatcacctgagcctggggggtcaaggctgcagtgagcggagattgtgccactgcacactagccttggcgactgagtgagatcccatctcggaagaaaaataaaattgaattctatcgatgaaaagatgtaaagaaatcatagactagaagaaaatacttacataacatataacggataaagtattattatctataatgtataaagaatacctataagtcattaagaaaaagatatgttaatttaaaaagtggagaaagacacaaatagctatttcacagaagtggaaacaggaatggccaaatactgtatgataagatattcagcctaggtggttagaaacatgcattgtaaaactataatgaggtactattttttttctaccctattggaaacatttagaaagtcagtaccatgtattaatggatgtggagaggtataatggccaacagttgtgcacagctagcaagagtataaattaatatagcttcttggaaaataaaataaaataaggtgtacctactgtatttcctagcaattcagttcctaggcctataccttagagatattcctgcccaggtatatcagagtgcacctagcagcattatttaaaatggcaagaagatggaaacaatgcaattgtcatcttctggggagtagattaaagtaattgccatatattatttcatacctcagtgaaagtggagaagattaaaagatacattacactctgaatggtctaagtctcgaaacctattgaaagggaataatattgaatatcattctgtactaaaaagaaaaatgaataattatttatctttataaagctcaaaaacatgtaaactataaatgaacagttcatatatatatatgtagcaaaacaataataaaagcaaagggattttaaacataaattttgagatataggttgttcttattaatggaggatagaccaatagtagagagagacacaatagggagcttcagaagtaaatatgatgttccatttcttaagctaggtttatggatttttatgtcattattttcatatacatctacattatatacagtgtattgaatgtttgaaatatttaataatggtaaaattagagttgttttacaaagctttctttttctatcagccattctaatatttcagtgcgtcgatgtcaaaaatactgcttccgtatttccaaaatctctgacttggtttctttttagtcatttcaaatgatcccgtgcctttcttttgttttatgatttcattgttcttcgtagaatacatgctgaaatacatgttctttatgggaaaacttatttttgtaaacgaatgtgctaccattgagaggaacgaatttggaattgttgaaaaatttcgcagcatgtatttattcgttggttttcagccattccttattgtcactggtgtaagtctctagataaacatatttgtttctatacatacatatgcaaagcttgatttttctccttctgtcattaggcaagtgaaagaccagaataagaaggtagcaaatctgaagcacaaggaacaggtggaaaaaaagaagagtgcacaaatgttagaggaggcgcgacgacgggaggacaatctcaacgacagctctcagcagctacaggttagaacacaaggagaatctgaaaggatcgggtgaagacatttgatccgtaatcgcatgttgtttttctcttcatctttatcctcctcttttttctctttctaaccctgcttgctgccttcctctcagaccaactgtttagcaatgaaggaatggctttaagtagaaaatgcaagttttattccacagctttatgaggacacctcagcataggagaaagttcatcttgcttcaagttgatcacacttaattggtaagttcaatgacagtttaatgagtgggttatattaggcttcagggttgtcagtatacctctttgccagttccattcattaaaatggattgctaatcttggtttgtgtctttcttccttttttctattcttcctttctcttttccttctacctctctaacctccctctatctttccttcctttcctctttttaaatattcagtttagtaagaatattttacagtcatacagaatgtgacatataaactgtattttttcacttcagtggagtgataattgatgcctaaacctaattattcacagattaattaaaccaggctcaacaacagcagtagcagctaccatattataagtgccagttaggtcctcagtatttgaaactaggctctggtcattcattttgttctaaccttcacagtaatccaagtggagcaggtggtattgtatacattttgcaccgggggaaatagattcagagacattgtgttacttacgtaaatgcacacagcttctaaatggctcagccatgattttaactgggacttcctgaatctgtagactgtcctctttgtcttgatcataatgcttcagaatgaaggtgtagattatagggaagaataccataaatgtgctggagtctctgaaagccatgctaagactaagccactgccagattgtttttctctagttaacaatttctaattgggtctgatactgtgtatatgccgcaattacaatctttactggagagatttggagggtttactatgtagaagccattctgaggctttacaacaaattcttttaacatatgaagaagactctactttttacttctttttctcattcctcttttatgtaacttttactgattatgtttatagaaaaagtataaatttcctcaaatgcaccaaattttgcaaaaagcagcatgcccgtttttcctcatccttgccaataacagttaatattggcagttttctcatctttctgttcttcctccttttttttttttttaacaaaatacaaatctgatgagtggtaaatatttcattctgtgttaatttatatttctctgattaccaatgacattgttttttcaagtcttgaattttcttttgcttgttaatgtaatttaaatctctcttccattgttaggttttcctcccatggattttttgcttagtttatccacattttgagagtatatatttacacataaatacttttaagttgttctgtgctttcatatttttgcctttactttttaattcattttgtggtatttgtgtggtgaggatattttttctttattgctaacaacttcacaagaatgtttatagggaattatttcattgctcacaaacttgaattgatgtctttatatttcatgaaattaatgatgagtctgtttctaggatttcagtttaacctcccttcttgaactatggccacattgttgtttaattctagaaagtatttattttatgataaggcaagcctctctttatgttagcactttaactgtttcatttgtctttcttaccctgctcatcatttaatgttttctattagcagtctctctctataaaccaaagatactcttctaatcttctctcagttgttataacaccaaaagtgctttcatatgtaatctcttatttcctttttatataaactaaaagataaataagatagattatattatttatattttacctatagggaaaactaatttagagtggatgactggcttccccaaggtgtctaagtaaatgatagataccaaagttatgaaaaagatagctgatggccatgtgcaaattacacagagatgtaattcattcaaataccgtgaaaagagcactggactacaagttaggatacttaggatctgatctcagttcttttactaactactcagttacttaagtatatttctgtttgtttatttatttatttacttatttgacagacagtcttactctgtcacctaggccggagtgcagttgtgtgatcctcctgtctcagcctcccaagtagctgggactgcaggcttgtaattttttaattttttgtagagacaaagtctcactatgttgccttaggctgttctcgaactcctggctccacacgaacctcctgcatcagcctcccaaagtgctaggactataggcgtgagccactgtgcctggccctatggatcatatttagagattgcaatctgggtgttaggggtactccccaccactgcgttgtcatttacaacaacataatgaagaaatacagccggccatcgtggcttatgctaatcctagcgactcgggaggtgagatgaaggatcacttgagaccagagttcaagaccagcctgagcaacatagaccctgcctctaaaaaaatttaagaaattagcctggcaggatggtgtacacgtacggtcccagctactgtagaggctgagactggagaattgctttatcccaggagttcagggttgcagtgagctgtgattgtgccactatactccagcgtatgtgacagggcaaggccctgtctctaaaataaattaaatgaaaataaaagaagttaggaattcttggagaagttactcattccaggattagagcaagaaatgtacaagacaaacctaaattagtggttctcaaacttgtgtgcgttggagttacatggagggctattagaaaagtagattgctgtctcctgtccctaggggttttgattcagtaagtttggggaaagccccatgaatttgcattctaataagttcctgggtgatgataaaattcctggaccaggaaccacattttgaaaaatcactgcgctatagcatcatgcgatatgaaaaattaagaacctatcaaagactactggggtcatataaggatggacagaggagcaagaatgaaggggctatcactggcctaggatagacagtttgagcataagaaagactaatgagcacagttgtttaaaacaaagtatttttaaatccggaaacttcattgtgagactataaaaataatttggagattgctgggacaccagtgccctaacactgggatttactttttaaaattccaatggtagtaggggaaacattggccattttttgatagtttattgaagctgagtggtggtgacatggggtgtatgatattatctttcctatacttttgcatgtttgaaattgtccctaataaaatgctggaaaagaaagatatcacttaaccacttgaaactttcgtatctgtaaaatgagtcttaagacagataagacttcactcttagactttagtgtgtctttcagttctaaactagctttttaaccatatttgcgtagccctggagtggagcctgtgactctgggttcatttcttagccaagctccttatttgtgttttccctttacttgagaaatattttccgtattttccaagtaactcttttttcatatctttgcttgaatttcatggagttggtttcttctgtttttaaactgaaggtcatatagctttggtcgtatacctttgcttttgtctaaaaattataaattttaattaacatactagaaaaattaatccataatatatatttgtttatatccctctacattttcttttaaactttaattttacttatttgtaatactaatatatatacactcttccgtattttgctttttaaaaactttatatcatttaaacatttccatgagttatgtgtttcataatgatgcttgtacttactattttcagttgaatccagagttcagtagctttatacacgttcctctttttctggacatttcttaattttcaattttcacagagcaaatttgtacagataaattgtacccaatttggtgatttcctttggctattcctcagagcaaacttactcaaagtatatgaagtgttgtagcttttcttaaatttttgttaccaaagatgaactaatttatagtacttccagcagtttgcaggcattctgttttccctatagccactttggttctatttaattttttgctcattttacatataatggcgtcttcaagttgttatatttcatttcttcagtgacactgtccgtttttcacatgtaatgatctattatctgaaatttccgtgtcaaattttaattacatttgctacctatcatgaaaatcttttcatatcacctcctttgaattgatatgttatgaattacattgaggaatgatgattgttacatattttttctttttcagtcatttttcttttgaaatttattagattttgttgtttaaacatcttttcaaaaaaatcttttaaattgcttatcttgtcctttcaaggcaattttttcacttaatatccatttgcaacagagtcaagcatactagtttcttttagttctttagctgtgtgtatgtgtttgtttcttgtaaatgttcattgctttaatgcatgtggaatttatttaacttaacttacaaaacatagatttaaagtactctttctttaccctgatacccagttctcctggtagcacttagtaaataggtattctttaaaaaaattttaaatctacctaatcatatgctacataatcacacagaagtttccatttcattctagattcattgttttgtctttaatccaattttttgcatttcttcttcttctttttttttttttttttttttttttttgtgatggagtctcttgccctgtccccaaggctggagtgcagtggtgtgatctcggtttgctgcaaccttcacctcctgggttcaagtgattctcctgcctcagcctcccgagaagctgggattacacacctggctaatttttttgaatttttagtagagtcggggtttcaccattttggccaggctggtctggaactcctgacctcaggtgattcagccacctcggcctcccaaagtgctgggattataggcgtaagcccagcctttttgcatttcttttgccctttgtttacaaagtcagtaggtcatcttcaacgtcattaactttatctcaaaactttttttctaggtaaatttatcagttttttcaacaacctttgaaacatcatttgagtgtctttagtttgttaaattatactaataacttaaagaatattatcacttgtaatttatttagtcatctccagccaggaactaaattcattcctctttattcctatttatgtttattatttatcatgttaaaaaagatttaaggaatataaaatattttctaaagaaagctaatatccagattacaaccaaattattaaagatttgtggtagataatagagaagaaaaaggcaaatgaaacttcaagccataaaaagatgaaaaaagtattagcaaatgctctttattgtattcacctataaaataacctttcttcttatgaaaacggagtcaaattccttacagagctcctgtctctaaaggttgtgagcattaatgagatgatacatgtaaaagcttctataagagcaaatgttaacaggattggactaggtagtagtaacataacaggtacagtgggtcctccatatccataggttctgcatttttggattcagccaacggtggattgacaatattatggaaaaaaacaccaataaaacagaataatacaacaataaaaaataaatagaaaataatatagtgtaacagctatttacatagtgtttacattgtattgggtattagaagaaatcgaggccgggcgcggtggctcacgcctgtaatcccagcactttgggaggccgaggcgggtggatcatgaggtcaggagatcgagaccatcctggctaacaaggtgaaaccccgtctctactaaaaatacaaaaaattagccaggcgcggtggcgggcgcctgtagtcccagctactcgggaggctgaggcaggagaatggcgtgaacccgggaagcggagcttgcagtgagctgagattgcgccactgcagtccgcagtccggcctgggcgacagagcgagactccgtctcaaaaaaaaaaaaagaaaaaaaaaaaagaaatcgagagatgatttaaaatatatgcgaagatgtgcatagattatctgcaaatacgacagcattttatatcagggacttgcgcatctgtggattttcatattccaggggagtgttagaaccaatccccagaagatactgaggtgctatgtagggatgtaatgaaacgtgagagatactgaggtgctatgtagggatgtaatgaaacgtgagagatactgaggtgctatgtagggatgtaatgaaacgtgagagatactgaggtcctactgtagggatgtaatgaaacgtgagagatgctataattttcttgtaaaaggaggcactcacttcattaggagagaacttttaatttttccggtaggattttgtgagaaatttgcctcgtgttacttcatttagagcagtggttctcaagtaaggctcagttttggcgctaaggaatctttggcactgtctggggacatttgcaacttgaggggtgctaccggcatctagtgagtagagtgctgggtgctgctaaacgtcctgtagttctccggatagcccccacggcaaagaatttctcggcccacactgcaaatagtgctgaagtttgaaaccacgtttagaaacactttgaatgccagttctttatccgaagtgttactgtggatgaagttttcatgaatagctttggaaacctaatacgtatggccatatttatatttttttctatgtagagctaagaccaaagctgttaagttaaaactctgtagtggcagtgccacagtacccagtaatatcgcctaggtacatagttttctggtaccgtactctaatttgatgtgaaataatgctaggagagttgtggtgagtgagtaatttacataacatacacaataaccatcattctcgggcacataattccagattgaagttaatataccacgtgattgaagtattctgtattattgttaatgaagacttggtactctagaagtatttaataattgtcacacaatcgtaatcgaatgactggttatatttttggtgtgtcatagaatagtagaatagcaattaattatgtcttcttattttaatcatttttatcacaatgttttgtgttttaaatttctggctatttaggtgatctcttgatgttttcatgaaataggagaagtaaagggaaacactactaccttatttctgttttttgaaggaattattttagtatttctacgttaagtataataattctagtattaaaatattcattaagtgttttgtacttaatggtttgtttgtttgtttgtttgtttgtttgtttgtttgtttttaagacagggtcttgctctatgacccaggcaggagtgcagtggtgtgatctcagctcactgcagcctccttctaccggattcaagtgattctcatgcctcagccacccgagtagctgggattccaggcgtgtgccaccatgcctggctaattttgtgtgtctgtttttattagagacggggtttcaccatgttggccaggctggtcctagcatcatgtgatctgcctgcctcggcctctacaagtgctgggattacaggtgtgaaccagcacacctggccttatacttaatgttttgaatagtttatgtttaatctttatcagatgccgttttgatattcaaaggtcagttttgctagttacgttaaaaagcacgtagtaaatttattttatttgtgaagattaacacttgacctgcagggttcattttcactttttgttattcagcgactgccacttgtgatgttaagttcatcactggcttcactgttccaggtagaagttacagtttgccagagagcagtagtactacttttctattttttctcttttttaactctgaaaaataaaatacatttttaaagtatgcacatgcacatgtagatgtgccgtgtaaagaatacttataacatgatcatctcgagaaattggagtattgttggcatcccagaaatcatatgtgtatttctttgctatcatttttctcttctgttcctctagagattactattctgacttttcttcttctttgcttttctttatgacctgcacatatatcaaaaagtataatttagttttgtatattttgtacttcaataaatggaattactgtatttattcttttgtcacttcttttgttgatcattatttgtgagattcatttgtattagttatatgtagcatccattcctttattgtccttgtactgtgtttatttaattcagaattccacatttatattgaaagtgctctgaaaagatgattcatttcttttcaattttccattctttgaatacttcagatagtaccaaaagtaattccttttggcagaaagtgagtttagaagtaagtggttactttgctttttgtttttggttcaacacattaaaaatgttctgattggattaaacactgtcttacatgtgaaatgaaaatgatacctgaaaaactaagagaatctgaggatcccagagattctaaacacttttttgtcatttatcatggccttagatatgaatactcttccttacgatgtcatggtgccactcagttgtatcctatttctacctttgtgttttggacagttaattactgtgatttatagtaacttatctcatactttttggtctcagaagcctctttgcatttaaacattattaaagttcccaaagtgatttttttttctttttttaaatagagactgagtcttaactatgttgcccaggctggtctcgaactcctggcctcaagtgatgctctcaccttggcctcccagggtgctgggattataggcgtgagccactgcaccaggcctcaaagtgatttttttatatgggttatatatgatatacatgtgcagatcttttgacccagctatcccatgtcgtagatttatatgcatatacatgtccaaaaatataaaaatacatatgtacaaggtgacttataacattattcgtaattgcaaaattttgaaaacctaattgcctataggtgggagagtgcttaaattcaccatggtgaatctacacaaaggagactggcagttttaaaaaagaaatgaaacgtgagcaaaagaaaaaaaaaagatagtattttaatcgtgaatgaaatacatatccatgagtttatgctgatataaataagtaatcaaatacataaataaatggcatatggacagacggctctttctcatagaagaatttcagttaataagtatagatggaaatagaccaaaagaaaatcaccatgagacaaactgatggttgtgaaagttagtgtgtgaaagtttgaggttaaacatggctttcatagtctcaaaatgttttctctaaggtgtttatttattttaacagaagactaacttttcagtgaagaaacctaccaggacaccttaacaaagtgtttagagttaacattaccagtaataaagagacattgacctcatgaaccccttgatacaaggcactgagagggacacaatatcatttctgtgttattctttccaaaaatgtgtagcctcattccagtaatgagaaaatgccagacaaatgcaaattctgggacattttacgacataactgagcagtacactttaaatatgtcaagatgatgaaagacaaggaaagactgagcagttacagatgtattcgaggggaaatgtcagctaaatgaattgtgggatcttggattaaagcagatttcaggaaaaggaacagaaaattagctgggtatagtggtgcatacctatagtcccagctacttgggaggctgaagagggaggatcacttgagcccaggagtttgaggttgcagtgagcccaggagtttgaggttgcagtgagcccaggagtttgaggttgcagtgagcccaggagtttgaggttgcagtgagcccaggagtttgaggttgcagtaagccctgtttgcgccactgcgcttcagcctgcaagacagagtgagaccctgtctcaaaaaaagaaaaaaaaaatccggaaagaaaggacattggtggaaaaacaatgaaaggacattggtggaaaaacaatgaaagtaaggttctcaggttggtaaatagcattgtaccagtgttaatttcccagttttgatcatcttactatggttatgtaaaccataaacattacaggagcctgtataaggagcagatgggcactgttctgtttttgcagcttttctgtatgttcataattaattcagaataaaagttttatttaacaaatgtattgacactatatttctcagcacttttaatcacccagttcactttgccatctctttgaaataagtatgctttggaatttaaaaatgtcttactaccaaaattaacataacaggttagttagctcaggcatttttcctgaatttaggaatgcagatattatgttctcatattgttgacttcgtaaacccgtagtttaattaggaatgtagctgatcaggccgggcacggtggctcatgcctgtaatcccagtactttgggaggctgaggtgggtggatcacctgaggtcaggagttcaagaccagcatgaccaacatggagaaaccccatctccactaaaaatagaaaagtagccgggtgtggtggcacatgcctgtaatcccagctactcaggaggctgaggcaggagaatcgcttgaacctgggaggtggaggttgcggtgagccgagatcatgcaactgcactctagcctgggcaacaacagcaaaactgcatctcaaaaaaataaaaataaaaaggatgtagctaatcaagttgatcgttctaaagattagactcaaatcctcaagccatgatgatgtaatatggctattatcagtagagttatacctagacctagagatgaaccttgacctgtctgtatccttcaagtatagaaggtttaattttactcatttttaaacatacttgagatgtctttcattttttcaatataaatttatcgaatgctttctaagtgtcaggcactgttgctaatctttggttatacagcagtgaaaagacatgttctccgcccttctggaacattgtctcatggaaaaacaataaaactaaacaaataagtaaatatcaatcagggtaagtactacaaagaaataaacaggacactgtgatagatgatgggggagggaaatattttgggcaacaaatttaggtagtgacatcagaggagtcctcccaaaggatattgagatctgaaaaagccttataaaaagtggagaagacaaaaaattgaggttacccatatggcagtgaaaagcttggcattttcaaagtagagaataggtaagggtcaggtcaaaagggaccttataggccatgaaaagaagtttagattttacaagtagtgaaacagtctacgtgaaaagttgacaggatctgattcgcattttcaggatactgttttttgcaatatctggaggatgattggagtgggacaagagtcatacaaaagtgtttgctcactgtttcatacctttgtgtgctgtgcagttttctatgctagaaacagtaatgttgcacgagacaaacaagcttctttctcttaagaagctcacattctggtaagggctctgtgagaattgaggagagaggtttttatttatatttaaaaaaaaatttttggagacagactcgctctgtcactcaggctgcagtgcagtggcatgatcatagttcactgcagcctcaaactcctggacttaagcgattctcctgcctcagcctctggagtatctgggactataggggtgtgccaccacacctggctaattttttttttcttcttattttaagtagagactgagtcttgctgtgttgcccagtctggacttgaactcctggcctcaagcagtccttctgccttagcctccaaaatgcatggattatactttacattacttattataactttttatttctgctggctgtcaaaagatgtgttataatacaagtacaataatttcaattatagtaattgctatacgcagaactgaaattaggtaaattccagcaacagcaagaacctttcaaataaaacatatagaagcatagtcttagctgatttggctgttggtgaattggggattaaaaaaagctttctcttgaaagcctacccatcttttaagggtcagatgctttttcttgcgaagctgcctaaatcctcgcagttggaattaatcataccttctgttgtaatttcattagtttgtttctgcattgatttggggattattttatattactttgtattatatgctaattgtgtgctggttcttctgcatacttgagcttggggaccatgtcttggtattttacatatagttggtacttcataaatgcttattgattttaattgtatctatagatgtcaagaacgttctgtcacatgcatcttagcctggtctcttagtctatttgggctgctatagcgaaatactgtaaactggctagcttataaacaacagaaatttatttctcacagttctgtgcctggaaagtccaagatcaaggaaccagcagatttggtgtctggtacaggtccactttctggttcataggtagcaccttcttgttgtgtcctcacatggtggaaggggcaaggcagctctctgcagcctcttttataagggcatttaatgccattcatgagggctctgctctcatgacctaatgacctcccaaaagctccacctcctaataccatcacattggtgattagatttcaacgtttgaattttgggagcacacaaaattcagattctgattctgatctgatctgattcagatcattgcacctggcatttggagcctcctattaaagcaagctctgttttaacctcatcttgaggtcagatgcttggcttctctgttttacacaagctgacagtgttggtttctttgaatataacacgttgttttcctaatgtatgctcttctacttctgcagaatctttttcctgtggatttccagttttactacataaagattctgccttcaaattaacttttgttgatgaactctgcctggacttgttattgccttatccattgttccttagcctgaatgtttaatcatgctttattgtttacatacttttcaatacattgttttataattgcccctgtgtgatttaacccatttaattttcccttctcagctagtttatatctgccataagtgaagaattactttaaaatttctttttagtttttcttaaacactgttttgcataggttcattaattatagctgtacttattgagttataaataataaaatttaatttagttataatttttttggaactgaatgatattccattcagcatcctaataaatattctctaaaattctgtaggctatcctttaagagccttgtatgttttaacacaggaaatgccatcttcccttagttgagaatattaattctttgagcagtgacactcagatacacctttcagcaaggctgtaagttttagtcacgtcctaataatgcaaagtagagtggactgaaaggaggctcctatcaatagtggtttggggctttgttttcctttataacaaagataagtatctgaatttaaccttgaaagaggttgttgtgagagagattaatggaatgctgtggtgctgtgagacagctctcccgaaaccaatgaatattaagaataaagttcaaagaaagtgaaaacaatggaaatagagccggggaaaatcagctttacatatatttaagcatattctcttcttagatatatagtcaatgaaacatttgtgtttttctctgtaatttgatttaactctgtctacaaaaacagtttcttcattttgataagagattttttttcctttctgagaatgaacactacttatccttcatttttagatttgccagggggataattatttaagaaagccttttataaacattaagattgacatctttttaggaatactatttctagaaatagtatgtgatttgtcacatgctggatacatctaatatattaatgttcctgtttttgcaaaaataaattttgatttcctgtttctagaacttttccttcacctatttaaatgtttaatcctgtatcatttcttcctttttaataaaaattttttcttagtaaaacagggctttttctatatagaatattgtcgtaggtgagtttttatggtgttcttaatgaatattagagtaacggatcacaatggaaaagtgtgcatataaatcagcatctgtttttacatccctgtggatagttgctgaaattacgcatgaaaattctcttttactgcaggtgaagcacctacacaaattgttggttatgtgtgcagcttttaaaaactcctatctcaaactgggccactttttaccatttagaaagaaagcaaaaacacggcttaacattactttttaaaattctgcagtgtttgaaatggactctgtagtacttttccctctggccacatgtcagttcaatttaatagcagtgaaatttattgaaagactttattgataggactaatgtgctctccataaaatgatgaataaaattacattaggcactaaaattattaaaaactggactactaagttctcactttagtgaaatgaatggtttactcctttcctttgtgttgtgtgagctcttcttggtttgcatttggaaggaaaagtctccaatgagattcttttttttcttaaattttatttttaattataatggatacataatagttatacatatttacgaggtacacatgatgttttgatacaagcatgtaatgtgtaatgatcagatctgggtaattagggtactcatcccctcaagcatttatcatttctctgtgttaggaacgttataattctattcttttaggtattttaacatgtacaacaaagtgttgttagttatagttgccttattatgccactgaatgctaatcctgttattttttaagagaacagaagcaggtatgcaaatagtccattttctaagacctcagaagcaaaggtcagcctcttatgggccacatcagttgtctgttattttaaggaaaagatatttttgggattttttggtaaagactttgaaaaggtatgcttgttctttttataagcattacagatcaaagatttatagtgtcctaggattaggtaaactccatgtccttgcccaagtttctcatactcagctaccatgattttcaagatgagacccttcccagtctgtatgggatatttgtactctatgctctgtaaaatttattgatataaagcatcatttttatatgtgtacttttctgtttatttaatgaaatacatctgcttttgttttgactttggtttttaacaattggggttataacagagcaccactcttaactgaggggagacatttgaggtgttttaaggagaaggagggagagaatatttttaaattttaacccacagtattgccttaaagtagttggtgtgtaaccaaattctgtctctgtgttgtgctagctttcacttcatcagtgcatctggcttcaatttttttccccacaaagcatctgagaagttggtaaatgaattctgacatgttgaatgattttaatgaaatcttctggatgtgtatatatgcttaggggatggggaagagggaggcagaataagcagtggggttgaaggtaacaaagaattactgtctctttacgttaaggataatggataacagttaacattaatatctttcagaacaggttaaagtctgtctggtaagtggtgtttacttccaaggaagcagctcttattattaattcaaataaatgacttccattaccgtgtcagaatgagagctgggagagggaggagagaatgtgggagattgttactttggataatctttgtgaaatctgaattggccttctttctgctgcagaaaaaggcaaaagcttagggagatctaccatcatcaagtagctcttttttatgtgactatactgtagggccttgttaacaatttttgagggagatgtttgagggaacaacaaattaaattttaattgcagtttctcctctgcctttgcttttctgattgaatgtttgattggaaagaaaggcagctagctgggtgtggtggctcacacctgtaatcccagcactttgggaagccgaggcgggcagatcacctgaggtcaggagttcgagactagcctgaccaacatgtagaaaccttatctctatgaaaaatacaaaattcgccaggcgtggtggtgcatgcctgtaatcccagctactctggaggccgaggcaggagaattgcttgaacccaggaggtggaggttgtggtgagccgagatcacgccattgcactccagcctgggcaacaagagggaaactgcatctcaaagaaaaaaaaaggcagtggagggtagagtcttacagctcagtgatgtgtagcttggtgttgacagagctgacatcaagaagtaaagttctgagagatgtattgggagtggtatcatgggagttgctatagagtccagtctctccctgttaatctgcctgagtgaagctatagttaggctgtcccaacttctgccctagtctctttgaatataggagtcttcttctttaaggagatgagggattctttgaaaggtcttccttcttctccctctaccagacccctcaaagtagtcacacaaacctcctgccgtgaaccctgtactctgtgagtgaagtattcgtatttgatttcagcaaatatgtgaggctggcaaaagtaggcttcagttacataatccaatggtaggaaaaatggtctgggttcgttttggtgagtgcaaatgtggttaatagcagttgaagtaaaactctaaagatactgctttcattttaggtgatatgaactatttaaaatgataaagcatgttcctttgctatctctagatagctattaagtgagatgtctgtgacacacagtacatttctaaattttgggttgcctgaattgtttaagcagagtaaaatagccaagttagggcaggtgcatggaataaaactctctctctacttagtcttattcccctaggctgccaatttaatgcttttttctaattagtgagtgctataaaatggcttatctccaaacagtacctgtgttaatggcaaaaaccacaattactttggcaccaacctaataattcccctttgtaatttttttaaattttatttttattttattttatatatttttttgagccaaagtcttactccctctcccaggctggagtgtggtggcatagtcttggctcactgcaaccaccgcctccccggttcaggcaattctccctgcctcagcctcccgagtggctgggattaccggtgtgcatcaccacccaggataatttttgtatttttagtagagatgtggtttcaccatgttggccaggctggtcttgaactcctgacctcaggtgatccacccaccttggcttcccaaagtgctgggattacaagcttaatttttaattgacaaataataatcgtacgtatgtatggtgatgtttgaatacatgtatacattgtggaatgatcaaatcaggctaattaacatatccatcacctcacatacttgtcatttctttgtggtgagaacatctcaaatccactttttttttttttttaatactttaagttctgggtttcatgtgcagaatgtgcagttttgttacataggtatacatgtgccatggtgagttgctgcacccatcaacctgtcacctacattagctattttctcctaatgttatccctcccccagccccaaacccccccaacaggccccagtgtgtgatgttctcctccctgtgtccatgtgttctgattgttcaactcccacttatgagtgagaacatgcggtgtttggttttctgttcttgtgttagtttgctgagaattagggtttccagcttcatccatgtccctgcaaaggacatgagcttatccttctttatggctgcatagtattccatggtatatatgtgccacatttgcttaatccagtctatcgctgatggacatttaggttggttccaagtcgttgctattgtgaaccgtgccacaataaacattcgtgtgcatgtatctttattatagaatgatttataatcctttggggtatatacccagtaatgggattgccgggtcaaatggtatttctagttctagatccttgaggaatcaccacactgtcttccacaatggttgaactaatttacactcccaccaacagtataaaagcattcctgtttttccacaacctcttcagcatctgttgcttcctggcctttttttttttttttttttttttttttttgagacggagtctcattctgttgcccaggctggagtgcagtggcgtgatctcggctcactgcaagttctgcctcccgggttcacgccattctcctgcctcagcctcccgagtagctgggactacaggcacccaccaccactcctggctaatttttttttgtatttttttttagtagagacggggtttcaccatgttagccaggatggtctcaatctcctgacctcgtgatccgcccacctcaacctcccaaagtgctgggattacaggcgtgagtttaatgatcgccattctaacaggtgtgagatggtatctcattgtggttttgatttgcatttctctaatgaccagtgatgatgagcatttttcaagtctgttggctacataaatgtctccttttgagaagtgtctgttcatatcctttgcccattttttgatggggtttgcttttttcttgtaaatttgtttaagttctttgtagattctggatattagccctttgtcagatggatagattgcaaaaattttctcccattctgtaggttgcctgttcactctgatgaaatctacttctttaaaaacaattttgaaatacacagttgtaatttaaaattagactctgtttttgcctttttttttttttataactttttcccttgtctactttaagactagaagcagttataatgaaaattcatgaggaaacaggagtttaaagagggtctttattcagtgggggccaatagactctgagtatttcgttctcagactaaaaaaaaaaaaaaaaagttgattccccaaacagtcaaatgtgaggattcactcaaatgtgatgactaagcttattgataaacctccattgtatatctcttaaaacatttgcccaattttttttcagctgaactttgatgattggcctatcactgagtattcttggtgttgaactatttatgaatacgttggattactctaatttataatcatagtcacaagaaaatattttattagagttcaaatcacttgcagagtttattctgaataattcctgacataatgcatatcttgctggtttcacattcagtgaaatgctgagccatatctcaattctgtagtctccataatatctgcctttatattttaggtatgtttgggttccattttaatatagtctcataccaacagctgtgtttttataattgaggtcctgttagcctaaaaggcatttttcttggagaagaaattttgtcttcattgataatccagttttgttatactggagctacatcctcaggttctataatacccatccttcagtttgactccaagtcatccttacctcctggcgttcatgcccttgtgtagtcctctcccgcaccctgtcaggattggtctgtatgaaccgtacaagaaggcagaagtgatggcgccggcttctgaagctacatcacaaaagatactgatgcaactgccttgcactcctgaatcacttgccctggtgagagccagcctccgtgttgtaatgacactcaagcagcccggtggagaggaacagaggcctcttgccactagctgcaccaccttgccagccatgtaagtggaagcaaaggactgaatcctggttgacatcttgactaccacctcataagagaccctggcaccagaactgtttagctaagctgcttttgagttcttgacccacacaaactgtgtgagataatcagtattcactgttttcttaagctgctaagtttcgaagtaactcattaatacaacaatgaacaatgattacagatattttatatttttagtattaaggtgatctaccatagtctgatttttcccctctaaatccacagtttggttttctctgttagagtaataaatgctattttaaattgttttattcatattatcaccatggtaattatcagggttgggtaacattggagcttttgttggtgtttattacctatataactcatatttgtctgctgacagcctgtaagctgggaaaagagttacaaatgtatgtaaaacatgatgtgtcatatagccttttatagatttatttcctatgtaaaaaactgctctaactagtgccacattctccagtagaaatacaatgtgagccacacgtataattttgaattttctaatagtctcattaaaaaaactaaaaggaaacattaattttaataatgttttctttaatcaaatatatccaaaatattatttcaacatataatcaatatgaaaattattaaagaagtgttgtacctcctttttttaagactaagtttttgaaatttaggtgtgtttatagcacatctcagtttggactagccacgtttaatcacccagtagctagttgttgctagtggcttctgcattggacagtacaaatagtatattagctaaagaagaatattttcttctaagctagcggcagattaagaatgcctataaacaacaggtatgattttctcaaattaagtgtggcatgtcctatcttaatctctagctacatttagttccagtaagtcaacttcctaatttccagatgcttcagatccttcaaacctaaggaatatagggataggaggaattagggatagtacatagtatatgtagatttcttcagcattacagactcagaatggctcttactgtctcatagtttatcatgaaggttggtgaatatggactttttgaaggagaaaatgtactttagcatgtaaagcatgtattccaagcctcaggctacacatggtagaatcactcttacacttgggccaccaggaagcactttccaggggttttagcacatccccttacttcatcgatgtggtcctcagagcagaagtatgtgaagtctgttgcatttcatgattctcaagtctaatatgacatcttattggctcactcactttcaaggaagctggtgacaactgtcacttcttcaactcaaagtctggcattgacagattagagatttttaaatcttcagaatcttcaggatttatggaagaacttactgtgataatattgtcccttttaaaaaatgttgttatttagaacatcccatggttatcaaaagacttgaaaggaatttcttatcataattctgacccacttctgtaaaatattgccgtgaagaaattcataggacttttgaataaaaagctgaagagcacaatgatgtataatccatacatgttttgttctctttacctttcttttttctgatcatgagcactgcctgaagatgtgtttgcctggtctgcttttctcttttcacagtaaacagttaacttacatatttagatatcagttatctaaacaatgacacttgtaactatttccagaaggtctttagatccctattgatttcttcatagtgcaagatactcttttaacatatttttcaattttcttttgattttatatcagaactatgtattttatattatttacacaaataatacttacatgtcttagaataatagtcacttctcttattcttttctaactctgattcctcttcctctgagatgaccactttcatctcttttggttgtttctactgttgtttatttttatctttccaaatgacattcttatattattgttgtattatttttcttatttgggcgttgtctgttgacatcttatcatagatgatgaggaattagtgtttttacacaaaccaacacacacacttacttctttctgtccttccaatataattatatctaggtctacatttttaaaactgaggcacgtagtatattatgatttacattttggtctttcctagggtaccttagttttcctttttgtttttcctgtcttgggtatctctttctttctttctttttttttttttttttttttgagacggagtctcactctgttacccaggctggagtgcaatggcatgatcttggctcactgcaacctccacctcctggttcaagtgattctcctgcctcaacctcctgagtagctgggattacaggcgcccgccacaacgcccagctaatttttttgtattttcagtagagacggggtttcaccatgttggtcaggctggtctcaaactcctgacctcgtgatccacccgccttggcctcccaaagtgctgggattgcaggcgtgagccaccacgccctgctttcttgggtatctattcccagattcctttctacacccataaaattcctcctgatatcattgctactataaaaacacatcatcccttactaattgcccttggataatccatacatctgctgtttttcttggaaacattcatttcctttctctgctgtagtgtgtagttagtctctaggttgtgtcatgcttgtggttcccttcaccactcacctatggtagagctcttttttctggatcccacatcttctttccaggtttacctcttcattttcatagagtataccgtagtagcttcctgagagagtcgttgagtgagatacttttttggggggattttgcattcaactcccatatttgattggtagtttagatacagaattctagattggtaatcatttgttttcccttagagttttgaaaccattactcaaattgtcttctactttcctgtgttgcctttaaaaactccagtgtcttctgatttgttgatctgacaagtgatcatttttggcctttctaaaagttttcaagatgttttctttcctctagtgttctaaactttacagaaagagtattcatattatcatctaagcaccaaatgatggatttaatctttttgcaagagcgaggacaagaaagagtgattataaatattacctagcagtgctgttgatactctggtatttgtaggactcaagggctttcctgtttatttcttacagtggctcaacattttattaaattaaataggagattcaagctgtggttcaacacaagagaaacttcttggtttattttagcagagctctcaaaattccaaaactaaaactagtgccagattttacccactcgatagattaagtaattctggactttgtaaatgaaggtgagagagatatttgccgtcttctttctcttgtattttactatcctagtttgatacagttgcgttagagcaaatgcttccatacttagctttacatcgaaatgttatgtgacttataatatcacgtaaatattacttatcagccatttccttttatttgtagtttcacttggcttttgtttttcatccttattatcgagaaagattttgaaccaggctttgtcattaattccagaaatcttttttaaataaggctgtgaacactgagctcatggagtacactctggtttcactgccggcttcaggtaaagtcatgacatgagttttataatgaaacactatgaaacttgattctctgcattgtgacagattactaatcattttctccctaaaagttttttattgatacagccacaaagctatttttgccccacgcagatgtacaagtgaagttgtttgcttgaaatagattcctgggaagttatttggaattaactgtttgagcctcaattttagataatagaagcctctcaggagacttgcaaaaaacagtttaagagtgggataggatagaccgcacaaagacataatactgagttttccgtaagttgctaatgagaaacgttatcaactttatgtattaataatgtttctttatgcttctttatacttacagcaatctgtattttagaatcccacattactccaaaatagtcattctcattcattagagggtttgagaagactgaactaatcattgcatccatctcttagttcgtaatccttcttttatgtttagttttctttgattctgaagaaaccaccttggcctttgttttgacgggcatcgttccttgtctctgcgcgcggcgtccctttaaaaccctccactgtactgtgctgctcatggcaagtcaacagagggaaggaagagctcaacaaacaacgtttgttttcttttgttttgttttgttttgttttgtttgatacagataaactgccctacataaaacagaacctcacttatgggaatagatcacagtattttataactgtggagaaacacagttctctgagaagaatgaaaacttgtaacatgaacatcacgtacagcaccaaaatgtgaatttttttctaaatctcattttttaaaatttagaaaaacgagagaggaaaagatttatcaactgttcattaagaagaatgttaaataatagatgctgttcttccaaagtggggagaaaaatctgacttaactttgacagatttcaagttctagatttttgaaggtacagttgtcaaaaaggacttacaaaagtgggctgtggtataattgagtttcttagataaaataaaaaattcttggatatcttttcctgatatgagtactctgaaaattggagaatggtttagcaaatcttgctcttttgttttatgtatttttaaaaggaagcactttattcttaatcctctagtttcataagaagttaaagaaggaagtgcctataataacctgatgactgcagttctccatcccacttgaactcttcttcatgttgtcttcttaagatctctcctatcttacatgaactcagcgttctgtagggttttgtttgactttctgatagatcaacattcacctctccggaagctgtgttttaaacttgtgtagaacatcagggctgggaattgcttagttggctgataaaattgctcattcttagccagaccggtcacttatatccagttgtcatttttggttttctcctatgagattatgagaaaaccatacattcttgaaatactaggatgcatcacttgcttttcaatgtcttttaagaaatcgtttgctgacaattgtctatgaagaatatcatctgaaagatgatgctgcttactgcactttttcatgtaggcttaactgcagggaaagagtgttttgatattcggtcgaattactatctcatcaaagctggctttatgcttagagagtagttcaaaaacaactttgtgcttttaagtaatcaagcccttgccacctctgctgtctaacacagttttgttctctctgttacagagagcaaatttctcacatttgtcttgcttaactaacttgagcctttgctgttaatgatatacttcttcagcctccttctttcctttccttgctttctttattgtgtcctctgtgacgatatcttgttgacctggatttgcttctgatggaaagaacatttaataagcaaacagccctttcttaataaataggctctccctgggttaagtaattaatccacttcacctagtcttccatcattttctaggacagtctccgtaagaaggatgacaggattgaagagctggaagaagcactaagagaaagtgtacagataactgcagagcgggaaatggtgctagcacaagaggaatcagccaggaccaatgctgaaaaacaggtctgctattttatacagttccaagcaatgctgctggttaaccaaaaggtaacacacaaccagtatagtttaggtaaactatacatattgtatgtttatagggtttcaaaaacacttcatagaggagaagtcccaaggagttccttcatagcggtattagatacaaggatgtggtttcttttgtgtcaagtatagaaagaaagaccaactttattagcaaagctgagagagaattgatgaacattttgcagaatgagtgcctttcagtgccctgttcctagataaatgccttgtctactctttcttaaataagaattgaaataaagttgtatgagaattgactcatgttaacacagaagtccctgcattaataacttaggtctgatcccatatatatttatgtagcatgtgctaatgtattggacgagatgaaatggagcttgtctgtctgctacaagactgggcacaaccctggcttttaaacggaaagaaaaaacatgaacgtttctcttttttttcttttattattattaatttttttgagacaaaatcttgctcttgtcccccaggctggagtgcgatggtgtgatctcagctcactgcaacctctgcctcccgggttcaagtgattctcctgcctcaacctcccgagtagctgggattacaggtgcctgccagcacgcccagctaatttttgtatttttagtaaagttggggtttcaccatgttggccaggctggtctcgaactcctgacctcaggtgatccacctgccccggcttcccaaagtgctgggattacaggcgtgagccactgtgcccggccaaaaaaaaaaagatacaaacatttctgactgaaaaacgttaatttcaaatagctaatattttattcatttcataccctgcctcattgaagagaagagttaaggttgtaacaagttaaggttaacagtgagtatgaaggacatagaaaccatgcacttgagtcccagataagcagcctcggagggacttgctgaagagttctgctgtggcagtttgtgatgcttgttttacatatatcctgcatcttttaagatctccagactcttgcttttgacttttcattaggaagaataactacagatgggaaaagtgaatggaagaaatagttttaacaagtgaaggttataatcccagctcccattatgagaatgtgatttaagatttcaaacctaggccgagcgcggtggttcacgcctgtaatcccagcactttgggaggccgaggcgggcggatcacttgaggtcaggagatcgagaccatcctggctaacacggtgaaaccccgtctctactaaaaatacaaaaaattagctgggcgtggtggcgggcgcctgtagtcccagctactcgggaggctgaggcaggagaatggcgtgaacctgggaggcggagcttgcagtgagccgagatcgcaccactgcactccagcctgggcgacagagcgagactctgtctcaaacaaaaaaaaaaagatttcaaatctatctgacacagaggttcataacacttaattttgcagtagttgtttcctttccatttctttgtgggagaaatataaatgttaaacaggaaaaaaatactcaatgagagggtggcaggaatctttctaggaaccccttggtcagaccaaggtgttattttgagttaaggtagctatagtaaagaagggtatgtttccaaggcagacatagtatgtgccccagggagtcccttcatagctgtgtgagatagaaagatatggtttcttttgtgtcaagtatagaaaaaaagaccaacctcattggcaaagctgagagagaatgaactttttgcagaatgagtgcctttcagtgccctgttcctagataaataccttgtctactctttcttcaaatacattcctaatgcacagtcacatagagcttggttagtggagagcttcagagaagggatggtgacagccattgtgtcacccaagggtggagagtaatttcctttaatcttgattttaccctttttatattctctcctttatttttcaaagaaagatttttcttctgctttggcctcattatttattgacaagtattaaacatcagagatcatgcagagattttggcaattaataatcatgtcattatgggatacagacttctgttatgtattttcctttttgaggctattgtgtgaactgattataatatgctttaggggtatgttttatttatggttaatagacttcgcagtttttaggtttgcagaaaaattgagcagaaagtgcaaagagcttccatttacgcctttctctgcctcagtttcccctattattaacatgttgcgccagtgtagtatttgttaaaattaatgaaccagttttaatacattgttattaactgtgtggtccatagttgagggttcacttttcgtgacgcacagtcccgtgagttttgccaaatgtataatgacatgcatctgccattacagtattatacagagtagttgcactgcccttaaagtatcatgccccaccgatttattccttccccgtctccccagtccgtgatctttttactgcctctgtagttttgccgttttctttattggtagttggagtcatatagtatgtagcatgttcagattggcttctttcactcagcatctgcatttaaggttcttctttttgtggcttgatagctcatttctctttatctctgaatgatattccattgtatggatatgccgcagtttgttcattccttcagctgttgaaggacgtcttggtaccattcagtttttggcacttaggaacaaagctgctgtaaacattcacatgcagactttggtgtggatataagttttcagctcatttgggtaaataactgtgagtgtgattgctggattctgtggtaagatcatatggtaggagttttggaaaaagctgccaaacagtctcccaaagtggctgtatgtattttgcttttaattgtatgcttttttccttttctgttttcttgtccacctttctgctactcactgcctatctgaagctgttgcgtgaaatattgcatgagaccagttatttgaactttaagtggttcaaggtatgaagaaattgcttttatgtttatacttctgaagccttacaaccttcatctactgtcctctcctctcccattttttattattatttttatcgtttcctgtctttttttttttttttttttttttttttttttgagatggagtcttgctctgtcgcccgggctggagtgtaatggcatgatctcagctcactgcaacctctgcctccagggttcaagccattctcctgcctcagcctcccaagtagctggggctacaagcatgtgccaccacgcccagctaatttttgtatttttagtagagacggggtttcaccatgttggccaggctggtctcgaactcctgacctcaagtgatccgcccgcctcggcctctgaaagtgctgggattacaggtgtaagtcaccgtgcctggcccatcttttcctgtcttttagctctactattaattttacttatgtacgttaattatatgtactgagataatctacaaatgttcttttgaaatgccttaaatgaggcttttttgtttaggaacattatctttctcagattcaaaagttacctgtttctcacttaaatttagcttctgggaaagaatgactttttctgataaaggtaggatatctacatctcttaattcctccaagagcaaagtaaaattgtatgggagccatagctcttattaaaataagatgtagaaccttccaaagttcgagcaaggaagaactcccataagaaaacatctcttgatgccttttctttattctcacgggatccccttacagtttatttattcctaatacatgctgccccacgctgagcccatgctagaaatttagagaagttgtgtaatgacctaatgaaggaaggtgccccctaacctgtgtgagcaaattggaagatggaagtgaatgatccccacaggggagaacccaacagctcctttacttttgctttgtccctttccacgtggggattctatttctggaagctttctctgtttaacttttggtgggttttgtgctttattgaatgtgagtgtcacttttcttaaacaaggtctcctaaacaagtctcagaattgccaggggctaaggagcagtatgcttagttcagctatgatgttatgaaatttaaatttttgaattttaacattttaaaagagtgatttaaatatcttcactgggccgggatacagtggctcatgcctgtgatcccagcactttgggaggcagacgctggaggattgcttgaagccaagagttagagaccaacctgtacgacaatgcgaggcctcgtctctacaagaaaataaaaattaattagccgggcatgagggggtatgcctatattcccagctacttgagggactgaggtgagaggatcacctgagcctaggagtttgaggctgcagtgagccatgattgtaccactgcatcccagtctgggcaacagagtgagaccctgtctttaaaaataataataataacaacatatttgcacatatgaatttggttgttcttttaaaagccccatttttaacagtgatattcagtgataaacagtaatattttttcaaattgccattttgacattatttggcttataaagtataaattcttgatgttcaaggttataggattatatctgtggtttgctaggtaatgatacattaatgagcatttttaaggattacatatttttttgttgttgttaatgtataaagttcttcattggctgaaaatctcctctgtcatttatgcaacagttatcaccagaatacccaagttcattttcagaatgaacagttgccactacagaagcaaaactggtagaggggtatgtctgtagaagataatgtacactaatagaactataattgtattccttcgtctttcttattgccttttttacttttagcaatttattctttacttttataaacataattctttactggtctgaatattaagttatatttccctcattgtttattaaatggcagtgttgctctgaaaataaaattatactttcacttgtacctttttccctgctaacatttaaaaaaatcttgtgcttttccaaatgccacattaagcactgaaaatgaaaaggtaatagatacagcctctgtcttcaagaagcttgtagtttattgggaaagactgaaggatgaacttacaattatggttctgtttgacaactaccatggtagaggtcttaatacagagctttaggaacagaggaagaggggcaagcctgaaatccagatttgggaggtctgcagaaggcttcccggaggagattctatgtgtgaattaaaaaattagccaggtgtggtggcgggtacctgtagtcacagctactcgggaggctgaggcaggagaatggcgtgaatctgggaggcagagtttgcagtgagctgagatcgtgccactgcactccagcctgggcgacagagcgagactccatataaaaaagaaagaaagaaagaactaggcaaagaaatggaagatgttcaacatgttccatgtagagggagcagaagtgaaagctagaagcgtctaggaaaccaagttgtggttagtagctacagttgagtgtaaataggaatggcaagaactatgtaaagaagagaaaaagatgagagagtaagggagatcctttgtacaggtgtgcacagtcagatcatgctgaatgaagcatgttcaagcttatgttcaaggaagtagagaacctttgaacaaagaacaatagttattattagtttacttgctcatttattcattcaacagatctttataacttattcagtgggtgctgttgtagtcctggacaatacatactgataaacaaagtagctgtaatttcatgcctgagaccttacagttcagatagggacacagacactaacccaacagataacatttaattgctagttatgacaaaggaacaggttttcagaaatacacaataatttcttgaaagttggagggttagcagctattttagattaagtgctcagagagggtcctctgtgaaagcggctttgtcctgggccttgaaggctaagaagcttaccatgtgacaagtgggacagaagcagcaatcataatggtaataaggtggagaagagctgaacgtgtctaaggaagactaatatgactggcgggcaagaacagtgcaagctatgcagggccttttatataaggccattccataagaggaatggaagccattaaagagttttaaagagggcgtgacatcatctgattgatgtttttaaaagatcattctgggtgttgggtggaggatgaattagaggggggtaagattgaaagcgggaggatcagatggactattaaagtagcctaggctggatgtcttctaactgaggtatgcacacacctgaaagtgcatgaacactttcccaaaaggcacatgggcacaggctctcagcctctaaacatacgtatccctgaaattgatctgctcaaaaggcacctaaggtgtgcagattctcctttttcattttccccttcacggttctgcacccctcacttgacaactctcctgactcttactatcctctattcctcagaggtgaaaaaactttggaatgttaacaaagggacaattcagcatattggtgttaagataatggatgagtccgtcaggttgttttcaacagaattgaaataaaacctaattaagttgccagttggtagattatgataaataattttcgatgacacgttactatctggtttggggtatgtaattctgaaggaatgcaaagagttgagttatattgctacaacaaaactccttccattcctatccatttatatgatgaaggtttcttagtgcttacatctatagaagtgaaacataccgatagaattgatgctgaacccttatcttcctttttttttgagatggagtctcacttcttcacccacactggagtgcagcggtgggatcttggctcactgcaacctccacctcccgggttcaagcgattcttgggcctcagcctcccaagtagctgggactaaaggtgcccaccaccacgcctggctaatttttttgcatttttattagagacgaggtttcgtcatgttggccaggctggtctcaatcctgacctcaggtgacccacccgcctctgcctcccaaagtgctgggattacaggcgtgagccactgtgcccggtctgaacctttatctttctattaatagtaatattaacaaggggtatctaaactaataaaagtataaaagtcccattaatctcattaagataatatgtttaataagatacattttaattaaaatgtattcatgtttaataataattttcttataatatttaatatatctattggttttgattgatactatataactagtgattctaatcataactcagtgcacaagaattcttaagggttatgaccacaggaaaatattaaaatatcaaatttaaatttatataaatatttttattgagaaaagtacaagacaggatctgtgcaagccatctagcacaaagtaaattacattagtataaaattctaaggagaagtagaatggaaacaaggtcaaagagaaaaaggaaaatgtaaataataatttgtccttaacggtttttgaatagatgatgatggatatcaagtatggtatttgtattttattggatacttccttttctttaaaaaagtgatgcttttttaaaaaacagtctttaatacccaagaaattagatctttgcaactctttaaattttcgacgtaaaacatttatatatcaagttaaaatcattctgtctcagtatgtttgtgagcagaaaaaaagaagtataaaaagatacattttaaaaatcatagttgtataaactcttttaggaggtatagaagcaaaaatgtgtagagagacttttggtctatgcaagaggttgggcagatcaggcaatagctgaagagattccacagtgacagtggagataaagagaaatagatagatttaaaacgtcttttggaaatagagctaaaaggatttggtgaattacatgtatggataaaggatagaagagaaaacaaagatggccattggatttctggttggccaactgggagaatagtggtataattttttgagatgagaaagcctgagggaaaaatttgaggataagaagcaagacatggtattaaagaaatgttagctacattatcgtcagttttagaattgttatcagatatttttattattgatttagagatgagttctcgatatgttgttcaggctggactgtagtagctatttacaggcatgattatagcacactatggcctcgaactcctgggctcaagctacctttccacatagctggcactgtatgcgtgcacaatttatatttttagccaagttttctcttctgagatccaaagttatgaaatagacaacaacccatttcatatctttacaccaatatttccttgatatctcaaccagaaactaagttcaatcttttgattctcaccttccaaccagtttttcccccaggcttgctcatctcatctgagaggacttctttgtaatcttacaaagctgaaagtaggcttactgaatgtgagggaagtcgagtctgagagaggcagaagtgataggttaggtacagaaatttttacactgtggctttccagttcaaaaggtcgttccagaaccttagggaagctgtattccataatggcgaagaaggtggactctggagttagaaaccttggttggaattaggctcccatcacttagaaattatgaccttgggcaagttacttgtgggtcagttccccgagctgtaaaagaaatagttactacatctgccacattaaagagatggtatctgtataaagcacctttaacagattctgacacgtggtaaagccatagtaaacatctaccactattggtacttctgttgtcaccaccactgccctctgtggttccaaggggaggcactgctctcactggttggctgaaggccccagagaaatgtcgtatttatagaccctgtctggttgattcagcaccagcagtgacaaacttactgttaaattctaatttacatatgtcaagtgttaatactgtgactcaaggaaattcttgtcctctccccaatctggtctcatattctagaagttgtagatttgcatcaactgagaataacacagtcacctaatatgttgatcagatggacattattcttatcaccagattatttattctctgagagtctgtcttagatcaatacaggttcttaatctgtacattatttcctattttacatccatggtcttctcataaaaagagtttgagtaggccgggcgctgtggcttatacctgtaatcccagcactttgggaggctgaggcaggtggatgacgaggtcaagagttcaagaccagcctggccaagatggtgaagccccatctctactaaaaatacaaaaattagctgggcgcagtgctaggtgcccataatcccagctacttgggaggctgaagcaggagaattgcttgaacccgggcagcagaggttgcagtgagctgagatcatgccactgcactctagcctcagtgatagagtgagactccgtctaaaaaaaaaaaaaaaaaaaaaaaaaaccttgagtagctttagtaaactgctagaaatatatgctataaaatccagttctaatgctgtctttcagttttactaagccagatgttctatagtttccagaaggaagggagggaggggaaaaatactttcttagcattatttgaaactaagcattggttttagaacgttatccttagatgttattcctagaagcaggaagatacggaaattttaaaaccgtaaaaatattttaagggtttagtctttgtaatcttaaattggaatttgaaacatttgtttaaatttatgacttttttctcttaaacagtcacacatgcatttcctatgtactgcaaatacctagaaaacaaatcatcttcttagtagcaatgctcactcgtagtggtcagatacggtttctaaatactattcaatattagaaggacttgaaatctaaacaaaagttacttttttggcataaagtgaatattataagtatacatttttcttcacaagtgcttattggcttctgaaacctctgtagtctttatagcagcactgtcaaatagaacttgctaaaacagtggtaatgttttatgtctgttctaccaagatggtagcctctagccacgtttctgttgaacacttaaaatttggctagagcacctgaaaaactgatattttgcttttatttaattttaagtaaattttaatggccatatctgcctagtggctactatattggacagttcaactctatagtatgttggacagatgggtgggtggatggatggatggatggtcggtcagtcagatggacagacagatagatacatggatatctatctatctacatatacatagttagtagatactagttagtttttcctcctaagcctgacagagttgtgacactaggatattcaaatacaagcattttctgatatagttggtcattttttaaatttttgtttttggaaaaacatttgtgacataaaaccatgtttgtcaaaagtaatttttcctttaagaaataatggtggaagactagatcactttcaagggatattataattgcatgtgagtgttttcttccacattcgtgtggtagcatcatgtagatgcttaaagttatgacgtgagtgatggaattagtggaggaaaaaggagtggaatagttacagaaatgagagtcatctacattagatgtccatagtgagaacatgccaccccagcattgttaaaagtttatgtatcatccattcatttcgctgttcattcattgtttatctagatcctcctatgtgctagaaactgagaatactttactgaaccaaatgagtatggtccttttcctcatggagcttatatgttagtaggggagattgatcacagaaataaacatatactttaaaatttgatccatgcaaataaaaaaagtatagtattttataaaagtgtgtaacaggggaccttatttagagtgaatggtcagggaaagcatctcgtctattttattttattttattttatttatttatttatttatttatttattgagacagagtcttgctctgttgcccaggctggagtgcagtggtgcggtcttggcttgctgcaacctccatctcccaggttcaagcaattcttctgcttcagcctcccaggtagctgggattacaggcatgcatcaccacacccggctaatgtttgtatttttagtagagatgggattccagcatgtttttcaggctggtctcgaacttctgaacttgtgatccgcacaccttgacctcccaaggtgctaggattacaggcatgagccaccgtgcctagctggagggcatctcttaacacattgatacttaaattgagaaatgaaaatgaaaagtaagtaggaattagtgaaattaagaatggcaggtagtttacttcagcaggaaccacgtgtgtggagaccctaatgatggaaatagtttggcatagttcggaaatcaaaagaaaaccagagttcgtggagtgtactaagtcaaagtgagccggtagctctatggatagtaggtgagtgattgaataaatgagtgaatgaatggatggtgtggcatgaaactggagaggtaggcagaaaccagaatatataggatagtcatgttaatgattttaggttttatctcaaccacagtggttatcttttaagtaattttaagcagaagagcggtaagacttatttcctgttttaaaaagagtattccaggctgggcacagtggctcatacctgtaatgccagcactttgggaggctgaggcaggtcgatcacctgaggtcaggagtttgagaccagcctggccaacatggtgaaaccttgtctctactaaaaataccaaatttagctgggcgtggtggtgcacgcctgtagtcccagctactcaggaggctgaggcaggagaatcacttgagcccaggaggcagaggttgcagtgagtccagattgcgccatctcaaaaatagagtattccagcaattatatgaagaataaataggagagtaagggtagaaagggctgaggacatgttaggaaaacatataatccaaggacatgtagggtgatggcaaaggagatggagaggtctatttggagataaactcagcaagatttgctggtcaattgcatgttgatgatgagggagaggagagggaagtggcaaggttgatttctacgcttcttatcacgaggatctttaagtggatggttgtcttattccatttagtgttgctataaaggaattacctaaggctgggtaatttataaagaaaaggagtttatttggccatggttctacaaactgtacaaggagcatgatgcccgcatctgcttctggtgagggtctcaggcttccacttgtgtcagaaggcagagtaccttttattcttaatacaaactacaattcttgtagatttactgacacttactgattacctactgtctgccagtcactctggtacattctttctttataatattattcagttgttaaacaacagattctcagatatatgtaatgttttctaggtcgaaaacaagtgccagttcttgttgggtcctttttcagaagagtaaagaagggcttacatgtcttaaactacatgttccttctgagtgaagcaatctcttcaaccttaccttattcccttgtctggaaaaatcctacttcttccataaaaccttttctgaccttccaagtctgagttacatgtctctctcatgtttttgtttttctttttctttttctttttttttttttgagatggagtctctctctgttgcccaggctggagtgcagtggcgtgatctcggctcactgcaacctccgcctcccaggttcaagcaattatccctgcctcagcctcccaagtagctgggattacaggcgcccgccaccatgcccagctaattttttgttatttttagtagagacggggtttcgctatgttgaccaggctggtctcgaactcctgacctcaggtgatctgcccacctcagcctcccaaatgctgggattactggcgtgagccactgtgcccagcctctcatgtttttcaactgcacttgtacttagtcctgttttttttttttaataacactgcattattattacgtatttactacctattgctttaagagactgtctccattttgtctcctagaatgaaagctccttgagggcaggagctgtgtcttatttactgttgtatcctcagcgtctaccattgcacctggtacacaatggcattcaatgaatatttactaagtaattaaattatgagcgaataaatgaaattttgtcctgacttaatgtttgcagcatcactgtacttactaaacaatttaggatttaatggtaattttatcatatttttatacttatctaaacagtgttttgaaatgttttctttgttgcaattgcgtttccactggatttgataaactactttttcatctgaacagaagaacttaaaggtgtcagaattgtagatttaaagaattagaatagatatttatgtgaaagttatttacatttttgtgcttgattttaaagaatggtagccagagtggaaaaatacaatttagaaatcattattatccctgacctgtccttcagtggcaaaacagagggcttatatgtctcaaaaagtgaatgtgcaaaattgtaggcccactgttgttgacctcttagctagtgggaactagctgaaagtcttatgtagcagtgagccttccactcggaagtaccaggccaccatgtttatgaaaacatgtaataattcaaaacattctgcagagcaggtataaactgattagaatcatttgaaaatctttttgatcctactttatttccttttagtgggactgatgcttctgatcatcactggtaaatttgacattaggtttttcaagatttgcctcatctttcccggacttggaaataggttcataatattattaagactgattcatttcatatagtgctgtaatgggttacatttaatagtttacagaaatctcttcttaacatatcctaaattcattttctttgcttgctcttataagtcttaactgatttctgtgagacattcttgaaatgagtagctaagcagtccaaaagtgttacagatacaaacgttattcagaactatgtagaatcattctgtcttacaaaaaaaatagagtgttacgttggtaacataaacggtgcttgtaaagcagtttactggtttctgcagaagttcatcatgtttggtcaatgcacagattgtagatactgttgttcaaagatacttcatttttaaaatgtaagatgttattatggaacatgatattgataagcatatagaaagtatatttttaatgtttcaggtacctaagagatatgacagttcacgatcatcttctctttgccgttgtgtaatcagttcagtctttcaatcaaattctgtcaagaggaacctcgtaggtttcactgtagactctcgctctgctgtcaaggagtttgaatcccctttgttatggtggctggttatgaaatcagtcacttgacagaccctgaagtgagactgctggaaatacgtcatgtctgccttcatggtgacagctggttacaaaacaaaccccaccacagccattctgcaattgacaagggacttcaaaagccaacagggctgccacttcaaagagaattctgccatctctggcttgttgaaagaagttgttaaatggctgtaccctgccctaccagaaatctccatgtttagacttctccttcttttgatctttgaaagatgtatgaaatgacttaagttagaggaatgataaagtctctagtaatggcaacccagcactctgcattttgatccatttattaatggaaattacccagatatgttctaatgacaggaggtttaaaaactcaatgtctcagagaatgaatgtccaaaaaaagagttgaaatttcatagtattgttgtagccaccttaaaaaatctggaaatagtagggaagaaaatgaaactcagtgtgtttttaaaaccttccatttcttcgtgtaatttttagcccttttaatggaatcagattctgaatattgatagattagaaaacaacacaaatctttaatcataagattaaatttcatggttaaaacggacatttctccacttttagtaactctgtacttaaagtttgaagctaccttgtactatatttaaagttatattcatccctttctgctgaatacaattttaaaataattaccttgtgtttatcttaaacaataaaaaaagccttagagttttaatagaacccttaataaaaggtcagagtgctaacaatcaagggaaaaggcagcaacatgaactctttcttttagaatacggatagccctaaaagatggagtaatgtttagtatacttgaaaaagaaagcagaaaactttataaataatataacagtaaaaaaaaagtggagattttatactcaacatgaacttggagtgtaaattagttggaatttaaaatccttctaagtgaatggcatgaccttttcctaattgtatgttttctctctcatcctatgtgtataggaagataaagctaaagatctttagattcatttgccctgatctcctattttcttatttctcttaaaatatctctttacataaaatttttagaaatcgagttgacagaagctttaacgactgtaacttcctctataattttaccagatggggtcagtagataactactaaagaaattctgaagcagaactgaagcccccaggaaataaccccatgacatagtatgaccaaaaaattctctagaaacatgagtagtcgctcttcaagtaatgcatttggatttgtctttttttgttgttgttatcttagtttcttcctctagaaaaacctccagaaaatttttttgacaaagtagtacatgatattactgtcctggaagtccaggaaatatctatgcctttaaatttaggctcgagttttcattttattcagcaaaaggactgtatctgtgttttcaaaagttagagcgatgtgaaaaaattaagtccagtggaaacaaacctttggcacatccaaaattaaaccccagaaatgactgccagaagtctatggatactggttttcaaagcagacttttttttttttttaattttattttattttatttatttatttttttttgagacggagtctcgctctgtcgcccaggccggactgcggactgcagtggtgcaatctcggctcactgcaacctccgcgtcccgggttcaagcaattcttctgcctcagcttcccaagtagctgggactacaggcgtgcgccaccatgcccagctaatttttgtatttttagtaaagacgaggtttcaccatgttggccaggctggtctcgaactcctgacctcatgatccaccctcctcagcctcccaaagtcctgggatgacagatgtgagccaccgtgcccgaccagacatgtttttataccctatactctatctaaactgcagagcaacttctgtagcaggaagcactcttggagtctatgtggtggatctataccaagggatatatcgttcgcttgtaatgagttcttggggtgtttggctcttatttcttttctcctactgagaagtttgataaaccaagttattgatcatagaagcagtcatccaagatacggctgaaagtaaagccttgggagccagatggcttcccgctgatttttatatgcagtttatattctccttggctgtgtcttcctggatgtttcaatgaaagatatttttttctggagaaatgtgcacggtgggatttatcctattcaacagatagtttttgtgtgtgtcatgtcccaagccctatttggacattcaattgtcccttcctcttgtctctaccctctttaataaatgaataaagatgcattaaaattaatgtaaagtgcttcggattagaagtcaagtgacgtggattctaatccttgttctgtgtactaacagtgatttggcataagttttgtaatctctccaagtatctgtaatctcacctagatggaagaaattattatccccacaagtatccactcaccacctcacattgagataagtatttgcaagggttttagtcgcttacaaaggcagcatacaagtgttgagccttattatggccaaaatcacacacacacaccagacatgcgcaaacatacacgtatcatatatgcacatacatacacatattatacacgcacttacgtgatgtttatgagtttccctcttggtgtcctagggttaccagacataaaatcccatccttttacttttctcccttggctaatagtatacttttgataaggtcaagtaagtgtcattttatttgccaacattgtgtttctaacaactgtccagggttgtgttgaaataaattttctccacaaaatgtgtgtctaattaatgaaatgtcaactttatttatttctaggtggcagtttggtttttttcaccattgcaaatgagaagaattaaaatttccagttaaaatggcagtgaacttttatttttgttaaaaacttaaggaaagtgtttgagtctgttttactcacattatttcatttgatcttagaagaagggctgaatccctacatggtctgttttgtttgctgttttccgaataaaatgcaataaatattttctccatttgagatgatcagattatttaaactaagaaggaaatttctttccaaaacctggacaaattatatagccattcaacacttgctttattctattgtgttaactccctagcaaagcaaaaaaaaaatgccttttcagaagagaaattatcagagctcagagttctagggatggtctttgtcattccacctctattcatatttcatttcctaaattagacatttgtcacaaaccctaatgaaatattaagagctctcagacccagatgcagaagaaagcataaaatggtggttgccacatcttctttgttactactgctggaggaagaaaatgcaatctattacttagattatttctgtcctcccttcttccaggagcttatgtgtacccagtagatcattaattttttgtgttaattgattccattacaatctgttgctgaaataagcaaatcttgggagataaataatattttgctgtcaaagcatgatgtaggctgacttaaaaatagaaaaaatgaaataatattctgctgaaaagatagtttgttttcagggcattaattcaggtatttattttttagttttgatgctgtgctgtcaaagtcacctaaatagaattggcagtgatgaaacactggcccgtcttagcctctttctaacatcagtgacgcaagatactgagggtcatagcagcagggggatgtttgctttgaaaatgtgcatccacattttattgtgtcttatttttcaaaccctacttaggagtgatgagtgcttattacgggatttatcttcctaagccttctgagttgattttttttttaaataaaaggaaaattgagatggcttgaaaaagaagcatttctttcacactgatacgtttccactctcttttaaaaagagtgggaatgggaacactccccagagtgactcatgagataccattgtgggtgattttggtaaacactgatacatggtagcaaagcagcgctcagtgtgtacagcaggatggagtcggactactcagcttggaatcctagctttgctttctctgtatgacctcggacaaggcacttaaacccactaaccctgtttcttttgccataaaaatgaggataataatactttatacccaccatataggatcattttgaggctttaatgagacaatacatctaaagcacttagaacagtgtacttcaaagtagacaaataatgtaagtaattattattgcaataactatagttattccatagttataaaatactgtactgccggtatatatcttgtcaaagaattaccatgagttggcaaaaagaacgtattggaaaaaagagatttctagtgtaaatgatagcctaaagctctcttgggaaatgtaaattcaaattttcattagcaatagttgtgagatcctctaaaggaatttcctaggaaaggatgatagaatttatgtatgtaggtatatgtgtatatatgttttcactaatacttcaaaaatgctcctccactcaagagcttgttacctttttttcttcataattataaaacagtaggttttaatctggaactttgttctagtcagggaaaccagtggacttctcaagtgacaatctggcttgcatggtgactgctgaacctctggataatctttttgtaccactccctttttcttctaattgttttcttcttgtggagacttacgccttttactctcccaagagagtataacaagattttccatacgcatcttggaaactacaaaaagtgtttttctcctggttgtggaacagaagaaggtgggaaacttgaagaagcgggctttgccagcctctgaagccccctgttgtgctgctttcttaaggaaaataggtctgtggtaaagtcataatttgttcccttcttattctgagcaaaagtttattagcttgtgatttaagcaaaccatctggtcctgctggcactgcacactgtcaggccccgtgctttctgcttattatgttactgaaggcagttacatatttgagtcccagctctggcctgagcttttctgtgttttaaaacgtctgcttttgaaaattgtgctgtgacctggagtatatttttaaagtgtggataaattcttcattgtttagtataggatttatctcttcttttcttctactcatcggtctttaccctcgtttctctggctgtacccaatactgtacaactgctcagtggtaggcatgaaatggaaccaagtgattctagctggaagtgttctcctggattgtggaaacatagcagaaaatgaagtaattaaatttgactttgaaactgtttccctggcttagagccagagagcaaatcagatgattgattggaaataccaggaatgtatggtaccattcttgccttgaatactaaaatgctttagaacttacttggatatatgtataatctgaggcagaaatactttgagggtctcacactcaaatggatgggaaaattaagcaatctttaagaaaatgattttactaacagataaaaatctgaaaggtagagatttttaaattttttaacaatatgtaatagttgtacgtatttatggggtacatgtgatattttgatatatgtgtacaatgtgtaatgatcaaatctgggtaactggggtatccatcacttctaacatctattatttccttgtgttgcaacattccaaatcttctagctattttgaaattcacaataaatgatttaactatagtctccctactgtgctattgaacactacaacttactccttctatctaactgtatttttgtacccattaaccaacctcccttcatccccctctccctcctacccttcccagcctctggtaaccaccattctgttcactatctccatgaaatcaaatttcttctagctcccacgtgtgagtgagaacaagcaacatctgtctttccgtgcctggcttgtttcacttaacataatgttctccagttccattcatgttgctgcaaatgacaggatttcattctttttatggctgaatagtattcgtgtgtgtgtgtgtgtgtgtgtgtgtgtgtgtgtgtgtgtgtgtatacataccacattttatccattcatccactgatggacacttaggttgattccgtattttggctattgtgaacagtgccacagtaaacatgggagtgcaaatatctatttgatatactgatttcctttcttttggatatatacctagtagtgggattgctggatcatgagagagttctatttttagttgtttaaggaaacaccatactattttccatagttgctgtactaatttacattctcactaacagtgtatgagtgctctcccttctctgcatccttgccagcatttgttattttctgctttcttggtaatagccattttaactgggatgagatagtatctcattgtggggtttttttaggagtggtttgagggagagacagtgtcttgttctgttacccaggctggagcgcagtggtgtgatcatagctcactgcagctgcaaactcctgggctcaagcaaccctccagaatggccgagactacaggtgtgcactatcgtgcctggctaattttttgtagagatgaagtctcactctgtggcctaggctggcctcaaaccccttcctcctgccttggcctcctggaattacaggcatgagccaccactcccagcttcactgtggttttggtttgcgtttctttgatgattagtgatgtcaaacatttttcatataacttttggctttatttttatgtcttcttttgagaaatgtctatagagatcttttgctcatattttaatcgaatttttttttgtttgctttggaagtaagagttttgaatgaagggtaaaatgtgtccttaaacatgacagacttgatgctggggaagtaactttcacagaaacaattgaagatagtcaataaaattgcatttatatcttggcaaaaaggtaagaaattctcaggtcaggggatgaacaggtagggaattcaaaaataagtacttgataattattgaacattgggttttatatcttcataggataaaagaaaagatcaaggcagcccaagatagtcaagtgggaaaccaaatccctgtcactcttttataaaacaaatccacaaagcccaaaattcattctttgaaaacaccaagaaagtcagctggtctttggtgagactaaaagaaaaaagaaaaatggcacaatgaacaatatttattttagaatgatagagggttcacaactactagtcttgtaggtgctagaaagatataaagatatctttgccagcacatttgaaaatttagactaaatgaccaaatgccaggaaaaattgaacttagcaaagccagctaaatatgaaaaagaaaacctgagaaaaatgaggcagtaataaaaatttttcctacaaatttcaagcccagagatttatattggtaacttttggcaaatatacaaggagcaaataatttcaatcttacagacacaatttggaaatataaaagagagggaacaatcactcaacaacatatttaataaggttcacataactttatatcaaaactttacaagttaatacaggaaaagaaaagcttaggcctgtctcaatcctgaacatgtagaaaaattcctaaacataatcagaccaatccaaaattagtgtacacaaaaaagaaaaatgtgcatgagcaagttttattccaagagttcaaggttggcttaacagtagaaaactactgtaatcctggctaggcgtggttaattttttgtagagatggagtcccagcactttgggaggccaaggcaggtggatcacttgaagtcaggagttcaagaccagcctggccaacgtggcaaaaccccgtctctactaaaaacacaaaaattaaccagacgtggtggtgcatacctgtaatctcagctacttgggaagctgaggcaggagaattgcttgaactggggagatggaggttgcagtgagctgagatcactccactgcactccagcctgggcaacagggcaagactccatctcaaaaaaaaaaaaaaaaaagaaaactaattactataatccatcacagtaaaagatgatagaagaaaagttaagtgttcatctcaagaaatgcagaaaatttaacattcatttataattttcaaaaattcttaactacctagcaatacaagggaatttccttaacttaataaagggtatctattaaaaattacactacttgtagataaaacttataaaggattctttttaaagataggaataaaatagaatgcatgctatcaccatgtctgtacagcgttgtagtagtcattctagattatgcagcatggcaagtgaaagaagtgaatattataagaattacaagaaaagaaagaaaactaccatatttgtctatatagtaaacttcaaaatctgtcagtaagagcatttaagaagactgctagatacagattcaatttccgtaatctgcactgaacagaaaatttacattttttgtaaaaacgatactgtttactagaaaattaagcatataaagtacctaggaataaatattattaggatgtttaacattttaatgagaaaaattattaaactttatgaaagatattaaagttctaaaaatatatctagttcattacgtgttctagaacagtacctggcatatgataaaatctaaatatttttgcagaagttcaagaatagctaagatgctcttgaagagaacaagctgagacttattagatatcaagccttataaagtgataataattaagataatgaatgtagtattggtacaggactaggcaaaagagtggatcataatagaaagtgcagaaatatccatgcttgtgagtatacttgatatatatcaaaggttaagatagaatagatttttaaataaatggtactgcacattggctatccatatggggaaaaatgaaatcagacccctgcctcataccatatacaaaaatgaattccagatggattaaggactaaacatgaaaagcaatactttaaaactcttacaaagtttatcaatcagatattgtataacgaacaaccacaaaatatcagtagcatattgtgatggttaactttatatgttgacttgactggctacggggtgcccggatacttgctccgacagtattctgggtgtttctgtgagggtatttggggatgagactaacatttaagtcagcaaaattgagtatagtggattgccctccctgatgtgggtgggccttatccagtcagttaaaggcctgagtagaacaaaactctgatctttcccaagtgagagagaattccctctgcctgactgccttcgaactgggacattagcttttccttgcattcattcagactcagactgaaaccctggctcttcctgggtctggagcctgctcgccttcagactggagctataccattggctctcctggcttttcaagcctttggatttgggttggaactatgccactggctttcctgggtctccagcttgccagttcaccctatagatcttgtgattcatgagccagtttcttataataagtctttatttacacatatacactctgtttctctggagaattctgactaaggtacagacaataccaagcatttatttctcgttcacatacatggagggtgagcatggttggctctgagtttttttgcagaaattgacaagctgattctcaaattcacatggaaataaaaaggagccagaatagccaaaaacatcttgaaaaagacaacagctcagattttcatagagattatgttgaacctgtagatcagtatagattatggttcttatccattactgattttatgttataaaaacatagcttggtgtattatttgtacccagttttagataaaattttacatgaattaaactgataaaatggaatcaatggtatatgttcatgtaaagcttgcagatatgcaaatacatatcccagtatattacatagcaatatattctcttttttgtttgtttgtttgtttagtagagacagggttttgccatgttggccaggctagtctcgaactcctgacctcaggtgatccaccggccttggcctcccaaagtgctgagattacaggcacgagccacagcgcccggccgtaacaatatattcttatggcaactgggactgtgaggatgctgttagctgaagacatttaacttgctcacttctggaaggataaaaaaattcaggtgccaaaaaaactaaatgcatttgcttactatcattgtttaacagctgttaccaatcaacgtggaaactttgtttaggtaggaagcactaatttccaagggtcagtgaaacaactttgatttgtcatgctgatttttgactctaggtttctctgttttagtatcacacaaatggggtttatgtaggagtcaatgaatggcaaatgccccacctctacctgccctaccttctacttctgaaaagactggttattaccaagattatttcttggcaattaacaacctaacataaagtcttgtaattgatgcagttggctgtttgattacatttgcttctgaattaaaatgaacaagtttatttaaataattctgatttggtagccacctggaataagtggaaattactgataaagtacttaccttgctctcttagtttcttttccttatgttttagcattttgtctgtcttctctggtggctttttgtttgttgtttttcaggtctgttgctgtcaaggctttttttttttccccatgtcatttttaaagcattctgtctcctttctatctggtatgtacacacacacacacacacacacacacacacacacacacacacacacataactatataggtatatagggatatatttccttcctgcctatataatatatagtatatatataatatatatatatacactgcctatgtagtatataggtatatatatgcctgtatagttatataggtatatagggttatatttccttcctgccttccttaaaaaagaaaccctacctacctggatttagagcaagaaattgtctgattgaattctagcagtttctttaaaaagaaattcttcttaatgatgtaaataggaaaattttagtttagaggactaaaaattattcgtctatgtatacaggaaatctgttatttgccaagtttatgtcttttatttcctaaaatcgttctgtatatttttttatatttgtattgtattatttccatggaaatttctgggtcatttccaaagaacttccttaaaaggtattgtctgtggcagcgtgcgacttcttaaactgataacttgtatgcccttgcatgtattaagttctttctgacctaagctgaaaagaattatactgtagggatgttattatctgctatattgattcttgatatatacacacacataactgatccagaaagagtacagaattttcaatgtgttcctgcgtctcttcaattttctggacccaggagttgcgtgttacccaggtcctctgactctgattgatcaagacactctgttgttctctttcccatatttatgataggtggaggagttactgatggccatggagaaggtaaagcaggaactagaatccatgaaagcaaagctgtcctccacccagcagtctctggcagaaaaggaaactcacttgactaatcttcgggcagagagaaggaaacacttagaggaagttctggagatgaagtaagtgtttgtagtcttattcttcaagcatatgcttagtggaaatactttttctccctgcattcatcttctggctctgtgttttaccccaatacacttacttaattttagtgctaacttgtatttctcactctctagaataaatttggtcaaaggtggaacaaatcctgatcaaatagaaatatttttggttcctctttaatgatttttaaatcctctggcttatacatatctgtgtgtaattacctctctgaaattcctaaaatcttctggaaagttcaggcaaaatggcgagcttactggggaagagggctgttggttctgaggttgtatgaagactaggcaatttttaaacacattttttattgtaaacatttccaaaggtacacacaggtagagagaatgaacccccatatacctgtctccaagattcagtagttaccattttgccacactggaagccaatttttagaaaattgtcacttttagcagagctttgctatacacattttcctgcttcccccacattttgtaggttgctgagaccataatctgttgtgaagcatgtatacatctgctaatacatagtagatgtttcttttacttctcagtgaccttctgtttaaaacaaacatgtgtcttttgaaaatccagttgtaccctctcatttaccattcctaatccttccccttacctaaagaccctactgctattttactgaaaccaggtctatcctgggatccctcagttaccctcagttaccctcgttctgtgagcagttatctttatttttgttgtcttcttttctgtctcagagaataggtttttttctccttcataaggccagattcttctttctgtcacagatttcaagtccccgcctcagcagcctttcactgtcagttctttctcacgtgacccttgctcacttcttctctgcataaatgcacagtctgtctttggcctaaaataaaattttttcactccaactagtgctttaaactgacatcagtttacttttctgctactttgaactatcagtaaactttgaatacctgaataatagagctgtacagaatcttgccataataccttagcatgaattctcatgggacatgatgattgtgatattgtgactgcaacccaagaatgttgaggtgtcctctgtgctttcacgttcttgggctatagtgcaaggctacgagattctgtccttttagaaaagcattatgagtgatatgtcttggaagtaatgtgtaagtgaagccggaagtggattggcatagggggagaattaagagaggttagagttccgagtagcatcatcagaaaaaagcttgcaggtttaagtagagaaaggaaagtcctccctgtgactgttggcaatgacactagattcttcactctgtagtcactgcaggacccaccatattttaaaggtttaaattattcaattattgatcattgaacaagtgaaaagatttagtctacctagagaacttgagaggcagaaatatgaggggaatgaagtgtgcagggagactgaaacatgcgtatgtgtgactctggagctagaataagacagagtcttccctcaggaaaaggtagttggcccatttgcatagaaaattcttcagcaaagcactagaatagctttgttttctggaataatcctgacttcatcaagccaagagaaatgatttaatagctattttccattcctagcatatattaatgtaatttttgagcgtctgttacagataaatggtgaccgtaagtttggggagacgtaaaacggttcacttggtagcctgccagtggtgcattggaaacatttgcgttggttatagccagccctggagaggaggaacgttttaattggcagatcccacaatgggtcttctcttccttatgctgtggttttgttaaccattacttttttattccacttttatgttagcgtttttcccttaagaaagaaaggataaaagggagcaggggaaaaataataaaataacaactgtaataactgtaataaattttaagtatcagttgaggtcatgaggttcactgttaagaattctagatgaactagttcattcgacactgccctgcattcaaactcctcctgcaggcccaccctacattagcattcagaataaattttacaagtccattttttatttttaataaaatttttattaagctgtgaatttgactgccctgacaactggtttgttcagggaaggggtggcagagctctttggtttcattgagagtttagagctattcaataggtagcctcctatatgcaggcagttagttgtaagtcattcaaagaatgaaaccaacgagtagaagttaaatcactatactcattgggagcttaaaaaataaataaatatgatttaaaagatgatgtcaacacaggtgaaaaaggaaaaatattagaatctcctgaactgactagacagacatgtttagaagactggtcttctctggaaacaagtaaagctggcagagaaatccaaatatctctgtgttaaattatatactcatgagatgctttctggccaaaaaaaggtctcccacaaacagagaataaattttcatatgtacctaagaagagtccagtactaaattctgacatttaaaaaattattgactgttaggagagaaaagtagagtacaattgtgattaagagagctgttaacaggccgggcacggtggttcacacctgtaatcccaacactttgggaggccgaggcgggtggatcacctgaggtcaggagttctagaccagcctggccaacatggtgaaaccccgtctctactgaaaatataaaaaattggctggacgtggtggctcacgcctgtaatcccagcactttgggaggccgaggctggtggatcacaaggtcaggagtttgagaccatcctggccaacatggtgaaccctcgtctctactaaaagtacaaaaattagctgggtgtggtggcgcacactgtaatcccagctactctggaggctgaggcaggagaatcacttgaacctggaaggcggaggttgcagtgagctgagattgcaccattgcactccagcctgggtgacagagcaagactccatctcaaaaaaaaaaaaaaaaattaaccaggcatggctgggcacggtggctcatgcctataatcccagcactttgggaggctgaggcgggcagatcacgaggtcagaagattgagaccatcctggctaacacggtgaaccccgtctctactaaaaatacaaaacattagccaggcgtggtggcgggcgcctgtagtcccagctactcgggaggctgaggcgggagaatagcatcaacccaggaggcggagcttgcagtgagctgagatcgtgccactgcactccagcctgggcgacagagcaaaactccatctcaaacaacaacaacaacaacaacaacaattagccaggcgtggtggcgtgcgcctgtaatcccagctactcaggaggccgaggcaggagaatcacttgaacccaggaggcggaggttgcagtgagccgagatcgtgccattgcactcccgcctgggcaacaagagtgaaactctgtctcaaaaaaaaaaaaaaaattgtggggttgttcacattctaaaaaaatctcattagggatttatgacatggtgttccaaattaaccacaaaattgtaaatagttaaccaaattatatcctagtaacaatttaggggggaaaataaaaatgaaaatgcattctgagttacataagagcatgtttactcttcacaaagccatatttatttatacttccaccaaaagccattttttttaagtctgtagacatatgataaaggacttttagtggacttggaagcatttttcacaatgggctagaatactgaggttgaatgttatgtaggaaacccacataatataaaattattttacacttgaaaaagaaaacaatatgttgtacagtatagctataaacaaatagcattggtgggtctgggactagttaaaattatgaagcaaagtttatatctacaatcaactatcccttgggactcctcctcagttttgcttaactctctcattctgcttcccttttttctgccctgatattcagtgcttttatacggcccaccctatagacatttctttactttcttgtgacatgaattggaataaattacaaataaccctaaatgttctttgcctttctccttctttaaattttaaacttattccacattttagctttttaagatcagacataacttccaaatagaagaaaccatgtttaaaaaaaaatccatgctttttaatcattttcttatgtaaaaagcctcaagtggctggaataaggtctaagtaacaaataaagaactaaacttttcagataaaggctccgaaagtccctcttgttttcagctttcaaaattctttctctctctctatcaatatatggttcacgtgtaaaaatgtgcttacctgtgtagggatgaaattaagactgtctgtcatctactcctcacaaaaggaaggaagtgagattattgtcctactttttccttatcttttctttttttctctgttggaggtataggatcaaccctcatcccttttgttaaatataaatgaatcatttaaaaggttaattattgtaggtaggtaacctgatgcgttaacctaattgcaatacccagttgaagaaaatctgatatataatttaccagtatggcaggtttttttggttttgtttggatttttgatgttttttgttttttaattttcctttcaggaccatctttttcattgttctccagagtgtaccttataggtagctactcactctccaaataggtaaaactcccctcaagctatggatgtcaaagatagtaatctatccatttaatcataagcttttcttccagaagttactgaatgaaagaggattagaagatggtctgtgtagcaaaggatttgcttacattttgggccagtttgcttacccgtgaagcaggcatagtaagacttagacccacctcatgaagttgttgtacggatcaaatgagattttaaaaaagcacgttgaagttggtaaagctgaatgtgcttgcaaagcatgacatttacaactgaaaatccaatttgtgcttttgtgttcgtacctggagaaatcacttagcttttcaggtctgcagttttctcactcagattcgaaaggtcccccatcgatttaaaaattgtggactttggccagatgacctcctgaggtcccctgattctgtagttgtaaatgtcctgtgtaaatcagggaagtaattcatatacaagcacagtatactgaggagaagttggaagccaggtatcatgattcctggctgaggactaggctacgtgttcactgaatgagactgcccaaggcttaccagagattagatgctacagaatgagagtggaattgtaatattagagatagagccgtggggaatctggagttccaacccagtcaacatggagaaatccttgttaacttcagttatctagctgagataacacaaaagataggtttgaggaacaaggaccatgctctaatataaggcctactctagacccaggctaagactagtaaaagaaggccccaattaattcttacagggtagaccaaatttggacaatgagtctcaccgagatagagaagcctgggaaatatcctgagctttcagcagatcagcataccaaaggttaaatccaaacctatacaagttcaaggagtcaactattaactgacttatatgtactagaataaaaatcactgctcctcagaagaaattaacagaaccatatttgcaatatatcccatgttgaacttttaattaccagacatgcaaagaatcaggaacatatgatctatagagcagaaaagagcatgcagtagaaatcacctctgaggagtcctatttggtttaacagaaaaaaaaaaaaaaaacaactaaattcacccttatacattaaagaattaaagaaaaatgtcatgttgatgatggaatagataggaaatctcaacagagaaaggaaaagtattttaaaatggaaatttgacatagtgagaacctgtctctacaaaaatgtttttaaataccagccaggtgtggtggtgcacacctatagtcccaactacttgggagggtgaggtgagaggattgcttgagcctgggagattgaggctgcagtgaactttgattgtgccagcatactccggcctgggcaacaaaatgagaccctatctcaaaaaagtaataatcataaaatgaaaatggaaatttgataattgaaatagaaatgaaacatttattggatagtctttttttttttttttttttttttttttttgagatggagtgtcgctcttgtcccccaggctggagtgcagtggcgccatctcggctcactgcaacctccgcctcctgggttcaggcgatcctcctgcctcagcctcccgagtagctgggattacaggcatgcgccatcacagccagctaattttgtatttttagtagaggcgaggtttttccatgttggtcaggctggtctcaaactcccaacctcaggttggcctcccaaagtgctgggattacaggcgtcagccaccgtgcccagcctattggatagtcttaatggaaaattagagctgtcaaaagaaagagtcagtgaacttcaaaatagatcaattgaaattattcaatctgtagaacagggagtgaaaggatttttaccgaatgaacagagcctcagtgacatgtaggacaatttcaaatgggttaacatacatgtggaacactagaaggataaaagagtgagaatgaagcagatgaaagacagtttttaaaaatggccaacatatttctataatttaatttgaaaccatgaatctttgatttacaaatcccagaaactaagtgaaaccaagcaggataaatacaaaaaataaaaaaatcacaactagaaataccatagtccagttgctggaaacaaaatatgcagagaaaaataaaagcagcctaagaaaaaaggcacagtgcataaagggaaactatgatagctgagtccttatcagaaacagtgaggacctgaagacaatggaacttctttcagggtactaaaaaaaaaaaaaaaaattagcctaaaattctgtaagcaaagaaaaagatcctttaaaaactaggattaaataaagacaatttcatataaacaaatatgaaaagaattcatctctagaaagcactctagaagaaatgctaatgagtgttcttcaagctgaagggaaatgaatccagatgggagcatgaatctacaggaaggaatgaagaacaccagacatgggccgggcactgtggctcatgcctgtaatctcaacgctttgagaggccaaggtgggaggatcacttgagtccaggagtctgagaccagcctagacaacatgacgaaaccctgtttctacaaaaaaaaaaaaaaaaaaaaaattagctgaggatggtggctcatactcttgttccaattacttgggaggctgagactgaggattcctgggcccaggacacggaggctgtagtaagccaagatcacaccactgcactccagcctgggtgatagagtgagactctgtccccctgccaaaaaaaaaaaaaaaaacacagacatggtaaatcagttgatacatatagaaaatgtattttttcttctcagaattcccttaaaagacaactaaccatttaaagcaaaaataacatgatgagttggcatttataatatgtgtaaaagtgaaagatgggacaacagtatcccaaaatattaggaggtagaattgtaaggttcttacgttcgtgaagtagaaaatatgaactgttggctgggcatggtgactcatgcctgtgatcccagtgctttgggaagctgagactggaggatcacttgagcccaggattttgagtttacactgagttctgtttgtgccactgcacactagcatggttgacagagtaaaacctggtctctaacaaaaaaaagaagaaaggaaagagagaaagaaagatagattacgaagtgttcgatgtgaagtagtacaatttctaatctaaatagactttgataaggtgcatgttgttagctgtagagcaactaccaaaataataacaacaaaaattttaaaaaccctgaagagcggccaggcaccatggctcaggcctgtaatcccagcactttgggagcccaaggcgcacggatcacttgaggtcaggagtttgagaccagcttggccaacgtggtgaaacccccatctctactaaaaatacaaaaactagccgggtgtggtggcgggtgtctgttatcccagctactcgggattctgaggcaggagaattgcttgaacctgggaggcagaggttgcagtgagccaagatggcgccactgcactccagcctggacgacagaacgagactctgtcacaaaaaaaaaaaaaacaaacaaacaaagaaaaagcacctgaagagctaacagaggaaataaaatgcaatgctaaaaattgtttcatttatccaaccaataaaggcagaaaaggaacaacaaataaagaacagaaacaacaaatgaatgacataaattcaaccatatcaatatttatggcaaaatgaaatatagtaaacacaccaagtaaaggacagagatactagattagaaaaaaaaaagcaaggctcaactgtatgctgtacataagacctgtactatcataaacactggctggaattaacggaaaaaggtacttcttggaaatagtaatcctaagaaacctggcatagctatattaatatcagacaaagagtattcccagagataagaaaagaccatataataaagataaaggggacaacacatccaaatgacataataatcctaataaatatatatctaatagagcttcaaaattcatgaaggacagaccgacagaactaaaggtaaaacaaatctgtggtcaccagtcattactggggattttgacctctattccttagaaactgatagaattactaaacaaacaaaagcaatcagaaatatagaagatctaaagactattaacttgacttatttaacatttatagaatactacatctaacaactgaagaaaatatatgttttttaagtgcatatggaagtttcacagatacagaccatatgctgggccttaaaagtaagtctcagtaaatttcagaagactgagatatgctaaagttgttctctaaccacagtagaattcagttagaagttaataagatacttagaaaatgtttggaaattagataacataattctaaataccatggcttagagaagaaggaatgttaggactcgttttgaactgaatgaaaattcaaatgtgaagttttgtgtttcacagttgaaaaagtggttagaatgaaatttttacccttatatacctgtattagaaaagaagaaaagttgaaattcattgatcttagtttctacactaaggtaccagaaaaagaagcagagtaaaccacagtaagtaggataacggaaatattaaagataacagaaatcaaacacatagaagacagagaatcaacagaaaattcacaaaattcataaccgggttctttaaagaattaaaaaaaaattgataggtccctaccaaatggatcaagggaaacaggaaggcacatgaattgccaatacctggaacgagagaggggttatcactccagtttctaaagacacgtaaaaagataagacaatattttgagcaaacttataccaataaatttaatagacaaagtctttgaaaaatacaatttattaaaactggctcaagaaggaatagaaaagtgagcaggcctttatctattaaagaaattgaatttgtcatatggaaccaaaaaagagcccaaatagccaaggaaatcctaagcaaaaagaacaaagctggaggcattatgctacccaacttcaaactatactacaggactacagtaaccaaaacagcatggtagtggtagtaaagcagacacacagagcaaaggaacagaatagagaacccagaaataaggctgtacacctacaactatctgctcttccaccaacctgacaaaaacaagcaatgggggaaaggattccttattcaataaatggtcctgggataactgcctagccatatgcagaagattaaaactggactctttccttacaccatatacaaaaatcaactcaaaatggattaaagacttaaatgtaaaacccaaaactataaaaaccctggaagacaacctaggcaataccatgggcgcgggcaaggatttcatgacaaagacgccaaaagctgttgcaacaaaaacaaacaatgacaaatgggatctaattaaactatagagattctggacagcaaaagaaactaccaagagagtaaacagacaccctacagaatgggagataatttttccaaattgtgtgacaaaggtttaatatccagcatctgtagggaatttaaacaaatttacaagaaaaaaacaaccccattaaaaaatgggcaaagggcgtgaacagacacttctcaaaagaagacatacatgtggctaatgagcatatgaataaaagctcaaagtcactgattattagataaaatgcaaatcaaaaccacaatgagataccatctcatgctagttggaatggctgttattacaaagtcaaataacagatgctggtgaggttgcagagaaaaaggaactcttacacactgtcggtgggagtataaattagttcaaccattgtggaagatgatgtggcgattcctcaaagacctaaaaacaaatacagtttgatccagcaatcccatcactaggtatgtacccaaaggaatatcaattgttctatcatatatacatcatgaaatattactcagccgttaaaagtaacgaaataatgttttttgcagcaacttggatggagctggaggccattattctaagtgaagtaacacaggagttaaaaaccaaaagccttatgttctcacttataagtgggagctaagctatgagtatgtaaaggcatacagagtgatataatcgactttagagactccgagggggtgggggagggaagatatggataaaaatctatatattaggtaccacgtgtatatagtactcagttgatgggtgcactaaaatcttagaattcaccactgtataactcagtcttgtaacaaaaaaacacttaaaccccaaaagctatttgaaataaaacaagacacatgtacacatatgttcattgcagcactgttctcaataacaaagacatggaatcaacctaaatgctcatcagtggtggactggataaagaaaatgtagtgcccatacaccatggaatattgtgcagccataaaaacgaacaggatcatgtcttttataggaacatggatggagctagaggtcattatccttagcaaactaacgcaggaacagaaaaccaaataccacatgttcttacaaggggagctaaatgatggcaacacatggacccatagaggggaacaacagactctgaggtctattggagggtggagagtggagggtgggagaagggagaggatcaggaaaaatgactaatgagtactagacctaatacctgagcgatgaaatagtctgtacaacaagacttcgtgacacaagtttacctatttaacaaaccttcacatgtgcccctgaacttaaaaattaagaaaaagaaagaaaaagaaatagaatttataatcaaaaacattcctacaaagaaaactccaggccccaatggctttactgttgaattctaccaaatgtttaagcaagatgtaataccagtcttagagaaactcattcacaaaataaagaaggtattatagaaatacttaccaagtcagcttagaattgtgaccctcctgcctaaacttgacaaagacattgcaaaagaataaattacacatcagtgtcactcatgaacattgacataaaagtccctaacaaaaccttagcaatttgaattcaatataaataagaaagctaatatatcacaaccaggttggccttatttctagaatgtaaggtttgttcagtattcaaaaatgaattaattaaactcactacctgaacaaaatacagaaaaaaatcatttagtcacctgagaacattcagaaaggcttttaataaaaggcaacacccatttatgataaaatatcttagctgactagagatagaaggtaattcagcttagtaaagagcatcatgaaaaatttacagctgacatcatacctaatgatgtaagctgaaccctgagattgcaaaagagataacaatgtctatatccccctattcaatactatattggagatcctagtaatgcaagaaaagaaggagggaaaaagcataaaattcaaaagaaaattctaaaacgtatgtattcataaacatggttgtttagggcattttaggcatagtttggggatactgcaagttttgttccagactactgaaataaagtgcatattgtaataaggcgagtcacgcaaatttattggtttcccagtgcttataaaagttatatgtaagcagggtggaatgggtcacgcctgtaatcccagcactttggggccatggaaggtggattgcttgagcccaggagttcaggaccagcctgggcaacatagaacctgtcgctacaaaaaaagaaaataaatagcggggcatggtggcacacaccagtggtcccagctactcgggaggctgaggcaggaggattgcttgagcccagaaagtcaaggctgcagtgagctgtaatcgcatcactgcactccagcctgggtgataaagtgagatcttgtctcgaaaagaaaaagttatatgtacactatgctatagtctgttaaatgtgcagtagcgttgtgtcttaaaaaatgtgcatactttaaaaatgctttatttaaaaaaaattctcctgatcatcttgagccttcagggagtcatgatctttttgctggtggagggtcctgcctctatcttgatggctgctgactgagcagagtggtggttgctgaaggttcgggtagctgtagcaatttcttaaaataagacagtaataaagttgccacatcaatggactcttcctttcacaaaagatttttctgaagcatgggatgctgtttgataagcattttacccacagtagaacttctttcaaaattggagtcaatcctctcaatcttgatgctgctttaccggccgggcgccgtggctcacgcctgtaatcccagcactttgggaggccgaggcaggcggatcacaaggtcaggagatcgagaccatcctggctaacatggtgaaaccccgtctctactaaaaatacaaaaaaaaattagctgggtgtggcggcgtgcacctgtagtcccagctgctggggagactgaggcaggagaatggcatgaacccaggaggcggagcgtgcagtgagctgagatctcgccactgcactccagcctgcatgacagagcaagagtccatctcaaaaaaaaaaataaataaataaaaataattctatcggccaggcgtggtggctcacgtctgtaatcccagcactttgggaggccaaggcggggcatcacctgaggtcgggagtttgagaccagcctgaccaacatggagaaaccttgtctctactaaaaatacaaaattagctgggtgtggtggcgcatgcctgtaatcccagctactcaagaggctgaggcaggagaattgctggaacccgggggcagaggttatggtgagccaagatcacgccattgcactccagcctgggcaacaagagcaaaactccatctcagaaaaaaaaaaaaaaagaattccattagctatatccaaggtttgatatatatctagatttttttttctcatgtatgatgaagtctctggattcctgagtgtttctttttaacctatttagggtgtggtggtttcatttcataaaattgggagttgggagagaggtatttgttgtggagttcacagtattattgtattgtggtgaaaaaacatagtctataaaaggaaaacacaggaggtgtaaataccactacagtcaagattttaaaactatccactgaccagatgtactggcattgaactgttgatttttgtcctcaggctggtgtcaagtgatgccatccttttgagtgttcctaggtctcttccttagatatatgaaaatgtttctcagaagtcctgatatccagcctcccccaacagtagacttttactcacatctgttaggctagacagagtcccgtgccaagtcattgaggagggaaagtgggattatcgttcttggcctaatctaatcagcacctacctctgaggtttagagatagtctttaaggcactctgcgaaggcaagatacatgaaaaacagttggaagcacaactggttaagcagccaaaagagtcttcggttgtctctgagttgctatctttcaatatgcctgggtgtcagccaatttattggaagggagaaagaatattggttgatctggagagtctgataattggcattctgttaggagaacctctgttatgcttatttaaaggccctttaacacagttctattatttcgagtttttacaatgtgaagtcttctgtttgttgtaactcttttttttttttttttttttttttttttgagacggagtctcgctctgctgcccgggctggagtacagtggcgtgatctcggctcactgcaagctccgcctcccgggttgacgccattctcctacctcagcctcccgagtagctgggactacaggcgcccgcccccacgcccggctaattttttgtatttttagtagagacgggtttcaccgtgttggccaggatggtctcgatctccggatccacccaccttggcctcccaaagtgctgggattacaggcgtgagccactgctcccggcctgtttgttgtaactcttaaacgaggacttgttttctaatctttggtagctgtgcttctgtggagctactttccttgggagtcctgttccttcagagcagcgtccaggttctctctctggggacttagtacactcactctttctggaccagtttttatgttaatttctgtgcttgggattctgtgtgtctctcatgcatcagtgatttctaatgagtaattcttttcctacccatagcctaagagtctttgttgcttcattgggctagtaagtaaagtttttctaaaggtctctatttttacagggatagtcaacctttgtgactttctttaactttatgcagaaaggttagttccatctcctcctgagccccagtcctgggatctcctccctaaggcttataacccagtttttaacctaccgctccctcgccccacccccgtaagttatttccacttaaactcatcagctataactgaattctttgttattagcacttctcctgctttggctaaagctcaatacctaattattattttctttttatgcactatttttatgagtttggagcaagaggggagggtcatgttgggttccttcacaatatttatcacaagtacaagttccaatttaagctaatttattttcagtctgttaggatttttttctccttctctcctaatttttgtcaactgttatttttgtaatcattctttttcttcctgaagtcttcaaaatccatcagatggatttgattgttgctttttagatatatatctgttgcaaagtttttgccattgcttatgggatgggatgaattacagctctcttaaacaacagttttctgtggaaaggcagcagaaggcaatgatgaaagatgtacttcctgctcttcatctctatttctgaaatcttattttgtttcctgagtttctgtaagagttacttctgcttaaaacttctgcctttacccaaactttatggtgtcttctggaatagtttatttttccagtatactttaaagaaaaaaaaaccttcggttctcagcctgctcatgacatccagctcctgttgctttggctcagagttccattctacctcatgataaacaccttcgtatctcattatatcttaaattctctaagctctaggagcagacttacagagggagcatactgtactatttaaatgagccatgacaggcctgggagtggaacttactgctgggaagtagaccaggtggtattaaaggggcttgttccatgtggcaattgctccacccgttaatactgaagtagaaaattggaggagtaaaccacgttcagttgctaatttcctgtggagataagacagacacactgtgcttgtgtatttccatctctccatgtaaaactgtattggaaaacatttctttttatttctaggtctgatttttttgttgtagttttattttattggcagagttcatgtagctaaacccctcagtgcttcaatttaagacatcgggagatgaatgaaattgttatgttattaagtagatgctgcagctctgcttgctagggatgaaatcctattttatgaaataatatagtgtgaagctgtcagtaatttccaattgtagaagaggcctaatcagaaagttgggttttttttgttttttgttttttgttttttttagacaggcccagacagttttttgaccagacatctatacatgtttcagtgagttaattactcattttattgtaatttcatctgttagaaagtacccaaataattgcaaagtttatgtatataaacttttatggatatatcacaggcaaacaataggtgatctttggcatggttgtagttgggaggtttcagatggagatactgtgggcacatgccctcttcttcccagctggcatcctgggaagtgctgacgggctccggagcaagtgaggccctagagactgtttatgacacgtcagtgttcatttgtgtctcatctctttgatcgctaagaagatacctgttttactaaagctcagctgttgtcagtttctttggattgattgtcttaaagggaaagataaatcaactttgtttttttcctgaagatagctaatcaggtcatttaattttggaccaataagtaaaagaataactgagtttaatgagtattgcgtaaaataagttcttggtgatttgaccctgggttgacttggcatgaattttctttcttttcaactccctgctgcccactttgtggtgttgtatgaataatgagtccacaggccctgtaaacatgttaggtgaggtgtttgttgtttattagtagttgggattaaatagaagttgcacactgaaattgagtgaagtgacttttctgcagttaacttggatgtcattggtttgaaggagtttttctgttgcagctgcttgtcctactacttttagctgtgggtgcatcctttctgcgtcctgctaaaaattatattcttgttttcacttttaaaacctaagacggttccagagctgtgtttggtttttgctttaaactaatgcccgagcgcccctttagttagtcaccaatcactgtttaggtaagttgatgattcctttttgctacccaagatttttttatttaaaattgagcatttttaacttgctttttaggtcagaggatcaatgtcctctgtggtattcctcctccatctaagcttcttaaagcagtattataaatagaggctttcaacctaaaaagtactgtgtatttcattgactagaactgaactgaactgtaggctaataaaaagtaccaaatgaaaatattatggtatctcattgcactccattgtagatgtaatgtagtgtgaccagcagtagctttgattcattgtaaatcccatctgaatactgacaacagttcaaaacatcaggagataaacctcaaaggtcacatttgtgtgaatggtcattgtgcatataagacatcattttattatttgaaaactagtagtgtagctcttaagacagggcagtgtcctaacctctgacagggatagaggcgagaggagaatcagtgggctgccaaacagtcatgtgttcataggtgaggttctgtttcttctttagctgttactattgttattattattattattattatttgcatgaatggtagcagttacttcacaggcaaatttcctatgaatcccagagtattgcaacagattagcagcaaataaagacctgagataaagaaaaaaaaaatgcttttattcagttatattaaaattaggacatttcaataaaaaactaaagcagcttatgttgttctgcatgcataaattgaaagaatacttgaaaattcttcaaacttgatggtagacattatcttacagctttcttaaaggaagtcagtttcttggcagtaggacagaggttcccaacattacttggttctagcacaatcactaaatttttcgtgacttttagaccaaaataaatacttaacagttcctaacagtttgttgtgttccaacagtttgtaatcatgtcaaaaaataatagacatattagtaataataaattgaaagaaaatattttaatttcttattacttactcatcaaatgtgtgattgttgggcatggcacagttttttaaaccttggaatcagattggccactgccaacttcatttcttgttccacgctaatttctgtgcagaactgtgctgtgcttttagtcacagtgctgcggtctgaatggttatgtccccccaaaattcatgtgttgagattctgaccccaaggtgatcatattaggaggtgtggagcctttgggagtgattaggtcttgaaggtggagttcttatgaatgggattcgtgtccttgtaggagagaccccagagaactcatttgccccttccactgtgtgagaaaagctgtgagtagatgccatctgtgaaccagaaagcggactgtcaccagatactgaatcttacagcactttgattttaggctttccagcctctggaactgtgagaagtaattttttgttgtttataagctacctagtttatgatattttgttacagcggcttgaatagactaagatacaccgcaaccatcaaaaactcaatttcgaagagatggaatatcatgaacaataattttgcatgatgtcgtattgaactgtgaaataccacaagctagtaatttgcacactgtctgacagcactgtgtttctcaaaatttaaaatgctctgcagtacccctgtgagttccctggggtgctgcagtgcacaatttgggaactgtggtagtattgtagatagtaagattatctaataataagtattgatgacatcttagtttaggaataattattagtatgtcagactataggggaagtgagtaaatcatatactaggttgttatcagaatgattatgaatttcttcacccacctgtggagagacagcatggcctatttttttactctgaccccaataagaaaagtattctgtaccttcccccttctctctccctttttgtctcttcgttatctctcactcttgctctaacagacacacacatagtgaaataagtatttaacaaaacagtattctcattatgtgcactctgactttttttttttttttttttaatgtctccttaagacctactgaactgacggaaactagttaaggtcacagactcgagagactgacgactttaaaatggccttcaccatttcctgtctgtgtgactgtaagcaagttatgtaacctctcagttactcagtttcctcgtctatagagtggtaatttgtaatagtacctagtgctgaggggatttgttttcttttgttttgttttgttttgttttgttttgttttgagacagagtctcgtgctgtcgcccaggctggaatgcaatggtgcgatcttggctcgctgcaagctctgcctcccgggttcacgccattctcctgcctcagactcctgagtagctgggactacaggcacccgccaccatgcctggctaattttttgtatttttaatagagaaggggtttcaccgtgttagtgctgaggggattttaaggaagttaatacatgtaaaacactttaaacagttcttttttattttattttattttattttattttattttgaggaacagttttgctctaatctcccagactggagtgcaatgggacgatctcggctcactgcaacctctgcctcttcctcagcctcccaagtagctgggaatacaggtgcgcgccaacaggcccatctaatttttttgtatttttagtagagatggtgttttaccatgttggccaggctcgtctcgaactcctgacctcaggtgatctgcctgccttggcctcccaaagtgctggaattacaggcaggagccacaccgcgcctggccatttaaacagttcttgatcagtaattactgctttattactagaatctcaatgaataatcagaggctaaaacatttgggaaattagggagatgcagtagttctgtgctctaaagggtactgcatacagtcaaaaggcttttctgaatttctgctcttgggcagatagattgtgtatcccttgccaaagattttccgtatttatcctcttgaatctggatccagttgagtagtaaacgggagtcaaaataagggagatgaaaatactatcgtcattactgacaaagctgattagagaacatgactttatatttgcagccaagtagcttcactagtatatcactcctgccaccagcacagctgcataactgcaggcttcttactgcgtggcagagagtagaacaggatggaccttctgcataagcagccaggtctgaagaggggagagcagaaggggctgaactgagtgtgttcacctctttcttcaaaatctgccaatgatataactcacaagggagggagacaagaaacataggcacagaaatgtgaagaatgagaatatcaccttaacaaaggaaacattttataaggatacaggaggtccataatcaagttcatgttttgtaacttttagtagttaggtatcctttctggcacaaactttaaaaacagatacaccagggtttgaattctgcctgtgtcacttaattgcactggcttaggcatcctagaatttctaagagccgtaaaacagacaaaactacttggcaagaaaaattgaccactgacttctctcccctgttctgttgatacaacattaaatttatcaatgtttgtttttgtcaaacttcagtagtgttagaggtatgagatcagccttagttgattagaggtatgagatcagccttagttgattagtaaaaaggattttatatgcctaagatagcaagagagatatgcctttgatctttcttatttataggaaaataatttattaacctaatttttattgtcacttctaacctaaatacatagttgtcctattaatggggacctttttttcccgtgagcatctgaaacagtcttttttttctatgtatgtgaagtggtaatagtttttctcgtgtatcaggcaactaccaacttattttagaccagaaattcttggaaatggtaccgatccagttggcataaaatgtgcaagcactattctattgattcctcaaaaagatgcaattgctttactcatagagttatcagttatttttctggctatttcacttgaagtagccatgctttgtctttttttctatggagatacgtggccaaaactaagtcttttcaccagctggatgataggaaatttgataaaatttgagcagtataaaaactttcccattgactttatatgattgaatttccactatgtaaaattaaactaattatttcttatgctacccaatatatagtttattatttgaaaactatgtccccatttttcctcaagaacatgattttgtcttttgcatctcagtgcaggggttggacagcataatttcttctcctagaaacacattttctgctgcttgtagctactatttctattttttcatcaacagctacaggagtaagtggagttcctgacatctctgtgtaatcagtggtatgatcacataccccatattgactttttcttttgaagtttatgctgctgtctcttcagtaccttgagcttgacctctagctttaagcagtaaaggtatcaaagaaaatcagttgccagagtcagtctgtttgcttgtgtcctcctaacccactgatggcacctctgactccttgacattgtattatttgtttctcagagaagtaaagcaattttttttttcctctgtcacccaggctggaatgcagtggcgggatctcggctcactgcaaccacctcccgggtttgagtgattctcatgcctcagtttcccgagtagttgggattataggtgcctgccaccatgcctgactaatttgtgtatttttagtagagacgaggtttcaccatgtgggtcaggctcgtctcaaactcctgacctcaagtgatctgcccagtttgccctcccaaagtgctggtatcacaggcgtgaaccaccacacccggccaaagcagttttttttacatatagacatttaatatattgactttggttgattcttacctcacttccaagataattgtttctgttaaattacatgtatttttaggcttgagtcatccactatatttatgagttggtcatttctttcatgagttgagcttgtttttaaaagttctacttttaaagtccccttctgtctctcctgcagccactttcactgtaacatttatcatgttattcctggcagccagtcttcttaactctccatcattacttttggcaggttacagcagtatcacttagggttctcttagttcatttttaatgaacatccaaaagatgctcctattgcaataaaaccataagaaaagattaatagaataagggtttattctattaataggcaatttggggctgctacagtggctccatgataccaatggttctgggctctttcttttccgctatccttagtatatggccttcttcctcctgcttgcaaaatggtggcatacagaagcctttcctacatattccagaatatgaagaaagacaagggggaaaagggacgtgccaactggttaaacaacaatcaccatatcaaagacccacccactagatttcttcttcttactggccagaactttgtagcgtgcccaccctctatacacaacaggctgcaaaggaggctggaatatcacgttttagttgggcagtgactatccagtgcaaaatccagattccgttagtaaaggatgttgatggagtggatggatattaaacagagattcaactttcctgttcagaaacgtgttataactccatatattgctttaattctatctatcctagatagacttacaaggctagaataagacctttagaggcactaaccaaccaccaaaaagaggctaatcacctcccatatgtaaatcaaattgtacaaaaaattgaaaaaaatacatgtaaagaccgaaaacattttgatttatcctatgacgtttcagtatttttctggaagtattaaatattctaaaatttttttttttgcccgggtacggtggctcatgcctgtaatcccaacactttggaggccaagctgggcggatcccctgaggtcgggagttcgagaccagcctggccaacatggtgaaaccctgtctctactataatacaaaaatcagccgggcatggtggtaggtgcctataatcccagctactcgggaggctgaggcaggagaattgcttgaacctggaaggcggagtttgctgtgagcccagatcacaccattgcacttcagcctgggcaacagagtgagactctgtctaaaaacataataataataaattaaattaaattaaagtgtgtggtagtgataatgggctggagggtatggtgagtctatgttgctgacatgctaacccacatcctgtctacttcatcagtatttcctattgtattagaaagatgagaaggttccttaaatttttaactccatagaggtgattcatttactataaagccttaagaaaaatacttaccctatctgggcctctgtttctccatccatgaaatgagaacattgatcataatagaaaagtaggcaaagaatataatcaagcaattcacaaaactatacacgcagatgactaataaaattataagaaaatattaagcctcacttatgacaaaagaagattaaatttaaataaaaagttcctttctaaaaatgtaacatagtagcagagatgtaatacccagtggcaataagaatataaagaaacaagtatttgagtgtaaagatagtctgaagtagtaaacgagggcaactaggtgtatttatcaaaggttttaaaaaatgcgcaaaaacttttgaccctgcaattctactttgaggaactttcctacctgaatttttgacaagcacacaatgattgaccctggtaaattgacataaggtatttttaactccagccagtttttttctttactgtagtaatttgtgtgaagctttctaagaagtaaatatgtaatttactgtcaaagcttttttcttttagaaaatctaagccatgaacatttaatatgttttcgttttaccttatattaggaagataatggcaatcttttaaaaataaaaattatttctttgttcatatcttaatttttgtttcaatctgtctgtccattttggtcttgtctattttacctctgggctctatctttactacaaccagtcttcctaactcttctcccaactttcagaagtagttttctaactatgtcaatgaagtatttccaaatgaaacttgccaaatggtctaatgccataaagacttctgcttctgtcttcattggattttagtcagtaaattttctttcttttttatttatttgtttatttatttattgagaatggagtctcactctctctgctcactgcaacctctgcctcccgggttcaagcaattttccttcctcagcctgccaagtagctgggactacaggtgtgcaccaccacatttggctaattgtatttttagtacaggtgggatttcaccatgttgtccaggctgatcttgaactcctgacgtcaggtgatccacccacctcggccttccaaagtgctgggattatagaagtgagccactgcgcccagcccatattcagaagttttctacagtttttttgttttgttttgttttgtttttttgagatgaagccttgctctgtcacccaggctagagtgcagtggtgtgatcttggctcactgcaacctccacctcccaggttcaagctattctcctgcctcagcctcccaagtatctgggattacaggtgcccgccacaacgcctagctaatttttgtatttttagtagagacggggtttcaccatgttggccaggctggtctcgaactcctgacctcaggggatccgcacttttggaggccgaggtgggcggatctacaggattttaaaacatgaagttgtgcctcttcccaaatttattctcagacttatttttttactagttttatttctgaatggcacattagagagagagaaagccagagagagagagagcgagagagaggaaagaagagacaaggtgggaccgatggtataattgagttcatagaaagacagtgaagtgaatcatgggtgtttcatcactttacaaaactgataacaataatatcatttctagaaacgtgaatttacagtatgaaatggtaaacattttttttttttgagacggagtctcactctgtcgcccaggctggagtgcagtggtgcagccttggctcactgcaagctccacctccagtgagccattcccctgcctcagcctcccccagcagctgggactacaggtgcatgccatcacgcccgactaattttttgtatttttagtagaaatggggtttcaccgtgttaggcagatggtcttgatctcctgacctcgtgatccacccgcctcggcctcccaaagtgctgggattactggcttgagccaccgcgcccggctggtaaacatctttttatagctaatgggcacttttaggctaactgagcagtgaacactattaaatatatgagaagctttttaaaccaccttccacttaattcataactacttgtcaggttgagactttcttttctctgttaaccatgccaatttttgctcagagcatgctgaaaaagctactagattactgtcacatataccaggcatggctctgttaacctgtttagttgtattattgctgaaaagttatttattccagctattcttgatattttaattatatatttttattattataagaaaccaatgacatactcatatgaaaaaatatctctgtgaaataaagcaaaatgttttggaaaagggatgcaggtaagtcatttcaaaattgctgttgttaatgcgggagaggatttggaaaaataggaacgcttttatactgttggtgggagtgtaaattagttcaaccattgtggaagacactgtggcgattcctcaaggatctagaaccagaaataccatttgacccagcaatcccattactggatatatacccaaaggattataaatcatgctgctataaagacacatgcacacgtatgtttattgcagcactgttcacaatagcaaagacttggaaccaaaccaaatgcccatcaatgatagactggataaagaaaatgtggcacgtggccaggcatggcggctcatgcctgtaatcccagcactttgggaggccgaggcgggtggatcacctgaggtcaggagttcaagaccagcctggccaacatggtgaaaccccatctctactaaaaataccaaaaattagctgggtgtagtggcaggcacctgtaatcccagctactcaggaggctgagacaggagaatcgcttgaatccaggaggcagaggttgcagtgagccgaggtcatgccattgcactccaccctgggcaacaagagagaaactctgtctcaaaaacgaaaaaaaaaaaaaaagaaaatgtgtaacatatacaccatggaatactatgcagccataaaaaaggatgagttcatgtcctttgcagggacatggatgaagctggaaaccatcattctcagcaaactaacacaggaacagaaaaccaaacaccgcatgttctcactcataagtgggagctgaaccgtgagaacacatggacacagggaggggaacatcacacacggcctgtcgggggatcaggggctaggaaagggatagcattaggagaaatacctaatgtagatgatgggttgatgggtgcagcaaaccaccatggcacatgtatacctatgtaacaaacctgcacgttctgcacgtgtatcccagaacttaaagtataattttaaaaaaagtaaatccaaaaaaaaattgctgctgttgaattaggttaacagttactgaatattgggagactttttgaaacctcacagtttgaaattggcattgtatttcaaatgtctgcatactgactagccccactttcacacaaccagagctgaaaaggatgtgaaaaagacaatactgaacctaagtcatcagattatatggtgatctttggatctcgtctaaatgaaaaaccagcaaagcagcttcaaagcagcaaaacactctctatatactttctttattctttaagaaatattttagttaatcacctagcagacttgagtgtcacataaaggggcttcttctatagtttctcataaataatttgctgattctgggaactctaaaaggtaaatattttatgtagcatgtgtatattgtaaattatttataaaaatgttttaaaagacctaatcctgaaatagtaaataactaaaaatttacaaatactattctcaaatagtaaataagtatatatgagctttcaagttagaactaaaatttccatgatgtgatatctattttaagatttgtttatcaaggaatattgtaatttgggaggattttttaaaagcagattttattttttctgcccttcacaaaaactaaatctgagccttgggaaatcagggcagctgcatcatgatgtgacttgcctggggtttggtattttgctgagatacctgccagttggaattagaaccctatgggtataactagggtagacttaattattggcttactgtatttaaatcaaaatgaaaagctcatacaaaattttgtacccgtactctgaaaaaatgtggaactgtttttggactaaaattttatagcttttgtggctaatgaggcatgaaataaattggcaagctcaaactgttcggagtacagtggtacagtgtgcattttctaattcccagcccttgggattccagcaaaggtcacaaattaaacaaagtcaggattaatcaagactataatcaaataaaactcaatcattaatcctcttctgacttacaatagagtgattgtgtaattgtgtgagaagcactggagagggctcttttgtagtgcgtaggaaaatcaacattaaggtgtcagacagaaaagtgaaaccctgcaggtgaagctgtctctggagccaagagaaactggcaatttatgcagagttgcaagtgaagctttggagcattgaaaggctgttggcactgagctgcagagcgtgtgggtctctcggtgaggcctccacagagatcagtttacgggctgcagcaggccgtttgctgagaagctcagtgtttgggtgcagcagctccaagcaacagtctctccaagttaactgccagaaatttactgtgtaattctcagctctttgtaattttgaagaagaggttatggaaaagcatttcctctgtgggagtaattatgtgtcagaaaatgccattcctcaataaagggggaaggttcacaaagcacagaactttgtcctatttattccatgttcctgacttctgaactgatgcttgctttctgctattttatgttctatagtgatactttcttcatttttcatcccttcatctcaagtcagcgtcagttttattgctttaaaagtcaacagtgatactatccagttctgctaagagtgaaactttaagaataaaatttgattttaattcatcccttattatatgtgagtatattttttatattcgctttaaggatagtatttacctctgtttgttagctttctgctttccttcgtataccaaatagaaaaattctcattcactcacccccaaagcatgtgcctgttatcacatgattcagtttgagtttctatattacacaatttctgtttcttacattgctttttcctatttatgtactaagctctctgtatatgcaggatactgttaggtatgatatgagatatttattattttctttcaagtaaataaacaaccattatccatgcatagctggtcagtcccataaattttagtactaaaatatcacttggattattttattagcaagactttattgtaatgatgtatttcagattttgtctttccatttaggctcatatatgttacattttggtatcattattgaaacaaattcatgaattgagttcatcattagaaaatgaaagcctcagaattttggtaattgttttggaccatcacaaaaatgtgcttggcatatttaaattctgtatttttttcccttacctgtaataacttttcaaagtacctaaagctatgatagaaatggaatagcatatagaatacttgtgtgtgtgtttgtatgcaggggggcggcttcttatttttaccttttttctgattttatatatacaatgttagatatattgttctgcaatttatatttcagtggaagaatattcatggttattttttaaagtcagcataaagatctgttgcattctgtttaacaagtgctttgtgttccagtgtatagatactgcattatttatttcatcctttcttggttgaagattgtttaggttatttccagttgtgtaatattgcagataatactgtaaagaaaatcattatacttgcatcttttcacatatgtaagcatatttttctaggatagataatggagttgctgggtcaaaacataatggcgtattttattttgaaaactgttgctcaagcactcttataaaaggctctaccccacatgtgctctcacccaaatgtgtatgaaagtgtgcatctccttaattgttaggtgtagtggatactatccatcttttacatttttgctgacttttatatttgagatatctttctacaccattactcacccttttctttccagcagagtagtattccatagtattatatttaattagtcctccattaatgaacatttaagttacttctaacagtttgccattacattcaatgctacagaattttaacaaatttgtaatgcagaattttcataagtataagaataaccttattacaaaagtcatttcacatgtatgcaagtatatctgcaggataaattccaaaatgtaacaaagggagtatgtatttgtaattctagttgatagtgtttttttggtttttgttgtttttttgagacggaatctcactctgtcgcccaggctggagtgcagtggcacgatctgggctcactgcaagctctgcctcccgggttcacgtcattctcctgcctcagcctcccgagtagctgggactacaggcgcccgccaccacgcccagctaattttttgtatttttagtagagacggggtttcaccgtgttagccaggatggtcttgatctcctgacctcgtgatccgcctgcctcagcttcccaaagtactgggattacaggcatgagccaccactcccagcctctagttgatagtgttaaatggaaaaggaagatgtaaaacagtatgctaccatttgtttacaaggggaagggtataagaatatccatgtgcaggcacacatggtaacatggcgagtgcgggggaaaatgaggtttcaagttagaactaaaattaagggtacactgtgacttaggtcacaacaggacataaacatttaatttactctgagcctcagtttccacatgtatgtaaatgaagctagtaaatgcctgtttgatagtattatgagaattaaatgcaaaattgtatgtgaaattatgtgacactgtggccagcatatgatacgtgtgtgtgtgtgtgtgtatattttgctctatattgtgccatatgtggcacagatatttcttgtaaaggtagcaattgcctgttgtattcatacaatgcggagcctacttgtcaatgatgcttttatttaatcaattatacatagagttgtcagcatggaaaatgcagcttctgttttgaattatgttttacttctgagtataatttaaaggcaaaatggcttcactcctagaaactcgagacctctaaagcttgttctcttcctgatgaatgttctctttgggcacttcaaatagagtatcttactcatggctttaggtgatatactgggaaagcatgcagttgctttagaagcctttataaataatacttgagtgttcaatataaaaccaatgtttggctttcgtaaccatttcctacatctcttctataagtttattgaattcacagtacacatctacactgtgagaagcatttatctccttttgtgctaataaaattaagcaaaagacaaagttactcccaagttcatagcatattccttgaaaggaatgattataagaacaaacggggatcaatgcattacatctttagaatacaggaaggagtttttactacttcattttaaaaataaggaaatagagatgaaaagctttccatctttccataccacgttcggcagtggtaatatgttttatacccactaatcaaggcatcctctgtgttttgatgctttgataagtagtcatctgcttttaagtttgtgatagtagattgaataagtgtcctcgtgctcacgcaggattatatacttattatatacttaggcaaatttgtctttttgaaccaagttttatcacttaaaatgagcataataataactaattcataagaatgctgtaaacataaaatgagtattactaactgagaatgtacagtagatagtaggctctcactacatgctggttttccttcttcctttccattctcttaggaaaactgatactcagaatggctaagtgatctgtgcatagtcaaaaggccaatttagtgatagaactgagactggatccatcactttgattacagctagattctttccattataccaagcagcatccatagtaatttactttcatttgtacaattttctatgagaaaaaatgagcaacaactatcagtttgtcttcaatcctgataaaatctagcacttacagaaattgctaagaagtaaacatttattacacaaacccatgccagagaggggtatgttgagttctagtctaaacatctttaataatgataattccataattctcagctgtttcttttagattgaccttttctcacctgataaaattttccaattctaagctctttattctgattgaaatctgacataacttgtctcagtcatcatttttccattctgagcttgcttatattttctaaacttttaacttggttctccagcctggcgaccttaatttgtccattttagaacagccaaaatatccttgattttgctggattaattcagttatctcaaattatctctgacttcctttttcacacctgattttccttagttttgttgattaaagattaatatgagtttgtatgccctgacagtggatgatacaaaagaaaactggtctaggaattaggaaacctactttctgtttcatctctcttcttattgccaagctgtttcctcactatgatgggaaaaattatgttgtaatcttatgtcttataaaagagggctcaaattggtatagactgtatattttgtggggaattaattatgtgactattcaacatttgacaaataattttggacgtaagtgtgcaatgtctaaagcccgaataattctaattttaatgtcaacgcacttgatgagttgaagtatggtgcttgctggtaatggggaaaaaaaaaggctacaaccaaaagtattgtgttatataaaattacatgtgatttgttgtgccttcactttgaatattagctttcctgacagccaatgtaagatattagttaacatggaaaataacttcttacatttacatattgcagtttttcagggcacttctgtacacatgtggtatctatataaattatatttcagaataaagaaatggtcactgtctataattcttacactgccacaccatttgaaacaggccacagagatttattactccatgagttttgtgaatattgagactcaaatgctatgtttgtacaaggaaatcacaaatcgtaactagaatacattcacttacatattacacctagagttcgttttctcattgttcttttaagtttttttctctgagtatgggtaggtaaagtatagcaaatttgttgcagaaaattaactgtgaccacattaaagacttgaaaccacactccaaaatagaaaaggcattaggaaaatattttgcttagaaggaatgattgttcttgtcttttcaattttttcttttaaatgtgcaacatgaaactactccttaccttgaaagctgtatggctgattgttgctgcttcccaacatcttcacccgttttaccggaatttcgcctctgctattttaccttctaagctgtgaacccttgtcatcctatttgaaccaccccctgccctcccacctccctgttattagcagtacatcaaagattggtcattggtcttgtctccctgctaattcatatcttgatgttcttgaacagtatttgaacagtgcccctttagaggaatatctaatgtcagtcatttcctattctgagttaagttaattgatctgataaattacaatgagcaagtgaatatagtgggtttaaaacgtatccgtctattctggatttgcttttgctctggagaaggcaaaaaggccaggaattagtgagtgacttagtcttctctcgtcattggcagctgacagacctactgatgaggtgataatgaactccaaagtctaccctaggagcaactgggagggaaaagaacccagacagaaggcatgtctcactttggagcctgccaagatttttgctttttcatagaattcatttcgaggaggttaacaggtagactttgctggatgcatgtcagaagtgtaacttatcattcatggacaccaaagacaaatatatattttatttctctcaacgtaacaagccagaggcctcagtctcagagacggtcactggggtaatccagtcagagagggagcatccgaaacaaggcttgaatataaagttcattttttaaaataactcttccttctttccattaaaattattatccaatacatatggtatgacagattagaccttccagaattatttgctactcctgtttatttgattcctagaatgttgcttagcggtctcaaacttaattggagataatgagtatacctaaggtaaatcttccaattttgtttccagttatgaatgttggtgaatctttccttttccaaattcagtttaggcctccactgcctgtttttcttcaggtatcatgaaagtgaatgaagtattttcaagtccattcatccccacctcacatgggcagtcgcccctcatacacatatattttgtagcccacacaggaggcaacttaatgtacaaaatgttttaagttaattactggaagtgtgttaaacatagaatattagtgagtttttaaagtctctgaactttaaaaataatcaactgtttgtagaaaaaaaatgaattattgttgatgactcagcgttccttatgtaaagacttggctttagtcttcaagaagctcttcagcttccctttttcggttttaggcagaacatggactttgagaagttttaaaaattctattattcccacccatgtttccctctgtctttaagctgtaataaaacgtatcaatgttctgggagtctgtattgctgaattgtcagggcctttcttgcttagtttcgcttgatgataaatttcaaggaacccatagtgcactatttttaaccagtttcgaggttgaaaaaatgctaagagtttgtgtccagaggtttggataacattgttaattgtgccaagtatccattgagtttggctttattctttatcctgtttaactggcattttctctgctgtaagaaaacagtccttaggagccacgacaactgattttattggtaaacatatgaatgaggcatgtttcataaaactttataaatttaatattagaaggacagaagtttgaccagacagttcaataaagacaattttatatatattttaactttctttgattccattcacttttcaaattagatatttcagattgtaattcttagaattgaccatgccatttattcctctttcttgaaagacaaatagaataaacaaaaatttgtagacatctaaagagtaatctaaggactatagttttgactcatttctttcatgagtatagtttctcttttctcttttataatataagatatgcacccgtttgtctattcattcctttttgcttctccaaacctgtttgcatctttggttgtgactcatttctttatttgatcaattgttaccattgtatacagtctctttagttggatatttgctgaagtcagataaaccttactggtttcagggatatgattgtggtatgaaactgccaatcttctactttgatgttcatgattcaaaaacttcttgttcctttggagaaaatgagcctaagttagtcgtcatcctggaaataagttttgatttctttttatgaaagaatgccaggaactttcaccagtttatctttgaatctttattttccaaaagtaaggtagaaaaatcctcaccgttttactgatttgcagactggtaaagtgaacaaggtgttagaatcaagacattttactcaaagaccactaatttaaaaaggtaagtcagaatctggcccaagaccttgacctctcaaattagatttaattatgaactgcattaagtcccattatttctcctattttgcttatcaagtgataacttctagtcagactgggataatcatgaatctacagtgccgaaggcattcatgacaaagctcaccctttgaagcagaaaagcaattcatctgtgtcaaaaaaggatgcaaactaagttttgatcctgcctgatagtaccattttccagctataccttgtccagcattctttatcaaagccagaaagactatatgcaagaagaatttagaacagactaggtactataattctttgtgtttgaaaggtgatattttagacgtagagacaaaaagtctcccttgagtttttgaaagaaattgcttgtaagggcaaatgttttaggttgaaaagttgatattttttagtttccctgtttatgaatagttcacagggtaatgttgtcagtcattttaaacttattatttctccctcttggaaaggttatagattgccaacagaaagtagaactccctgtttctgcgtgtttttctctgaaatagtgtgtgacgtagtcacattactccaggctcaattatagacagtttgtgggttttttttttaataatgccaaaaatctgtggataatgtataataagctgatgtacatcctactagaactgaggtatttcagtttgtgacaaattatgtcttaacatgttacctcgttaatagtcattggttcataaatgctggggattttaaatttaactctttttatacctaatattaaaaattaacccaatttaacattatttcatctaccacattactggccttgttttgattctaaatctcatgtcctaatttacaaattaccaaattaattcaaatgtataacctctttatgatttgaggcccactctggaaaagaaaaatactagacatttctattaaagtcatgagtgatttttatgtgtcttgtggatccatcccccagagtcttgtcttatatctttatgttctaacaatgaagtttttttaacgtacttttagcaaaatatacatatatttacacaagtattttagagttacctacagtaggatttagaggtcttttattcccatgattatataacattaaacaatatgtagcccccaaataaatttttctgtgggaacttcttcacgttgtctgcacatgacagttgatcttgggttgtttcagtactttccttggttttcctcctgtgtctttagccattccctagaagtcccctttttctctcccttacaactgatggtctctatgagtccacttttagctcccttctcttcttctatactttcttcccctatattttttccaaagtaatgttatctgttcagtggcatcagccgctattaatatatgctcatgacgtccaagtacaaataaatacacaagtggtttactctagcccatatctctgttcccaactttgggcccctatcaactgccaactgcacctgacagcttgaacattccataaacgacctcaacatacctaaaatcatctcatcattttttttttttacaaatatgctcctcagtatcttcatcatcaagaaatgtcgtttactcagttgttcaagccagaaactaattaaattgttcctaacaactttttttcccttgcctctcatagctttttcaacctttgagacatatctccacatcattttgcttctctcttcacaggaattattctattttatcactttgtttttgcaacagcatcttagctaatttgtaactaattttaccctttgccagtccttttcttctgcttcttccaggttaatacttggttgtttgtttgtgtttgtttgtttgtttttcctttggagatggtgtctcattctgtcacccaggctggagtgcattggcataatcactggtcactgtaacctcaacctcccaggctcaaggaatcctcctgcctcagcctcccaagtagctgagaccacagatgcatgccatgatgtccagcttaatttttttttgttagaagtgaagcctcacttcgttgcccaggctggtctcaaacccctgagctcaagtagttctcctaccatggcctcccaaagtgctgggattacagacatgagccactgcacctgcccttaatacttttgaaaacacgtgtatggtcatgttatttcctcttaaaattttccaaaggcttcttatcctttcaggataaaatgcagactccgaagcctgacgttgaaggttccccataatctgacttctcctgttgtacgccacgcccatgtgacctcacgtttctcctttctctctctttcgcttccccctcttgcctttttcctttctcccccctccccttttctccctcagttaagatgctacttcttccatgacaaatgatgctataggaggaagtcatttctttctctgcgtttgctttgaacctctcctattgctttgtcttttttttcttaccatggattaaaatatctgtgtacatgttttctgttgaattaggagcatctaattcagtgttagacacggttctacgtgttagcagtatcatctggaataagacagcctctgttcttggggagggagggtccttgtctttttcattcttggaactttttagaggtgatttgacaaataaataaatgtctatttaaaagttactaaaaaaaaaaaaaaaaaagccttagcgaccaggcacggtggctcacgcctgtaatcccagcactttgggaggctgaggcgggcagatcacttgaggtcaggattttgagaccaacctggccaacatagtgaaaccccatctctactaaaaaatacaaaattagccaggcgtggtggcacatgcctgtaatcccagctacttgggaggctgaggcaggagaatcacttgaaccccagaggcggaggttggagtgagccaagatcacgccactgcacttcagcttgggcgacagagcaagactctgaatcaaaaaaaaaaaaaagaaagaaaagtcttagaaaaggttttttttttctaaatttttcaatatagattcatctaataatctcaaaataattttataatagcctaaataaaatcaactacacacgtattaataatgaccttctatccctatttgggatgcaaagtgaggcaataactacaacaataataatatattgttttacgttttccatgtatatattctgaaagcctcacgagcagcctgtgagaaagctgctttcattatactcgttttatagttgaggaaagtgagtaattttcccaattatactaataaatgagaaggaacagatccgtaactttggtttccttttgctatctaatgttgctcttctagatcttacctagctggggaaggggaaaatgtgaataagataccaaaataagtggatgttaaagtaattcaggcaagaaattatgaattagggttatgtcagaggtggaccatgaagaaatattgaggaggtagaatgaacagaagatttaatgacaaagggatatgtggaatttgaaggaaagggaggagttaaagatgatttaagctaaaagctcccaggacttttgaccccacttttctagtgtgcttggtttctcctttaaaaagattctggagaatagtttaacagttcccaatggaagtaaattataaaagctgagatggcaatatttaaaccctagagccagcagcagtggattcaaccctgaagtttcaagcagtatcctttgttttatggctaagaaccagtatcatctgttatttaactaggaagtacaagttcacctttacaggaccaacattttattttcttctgtgaaatgcataaacaacataatacacgacaatgggaaaagtcagatagcacagaaaggcctataaggaaaagcaacaacacatctaccttttctgtccccctttccacatcctcgagtgagtgatcctttcagctttcttcactcaaaactttgcacttgctcttagctaaggctgagaagcaatcatcactcagaactttagactcataatgttattttttattgactccttgcaacagtcagtatttagcttacttaaattgctgcctgttttccctcactccttctcccagtttttgtattattattattattattattttatgaatcctcttcgttacctttgtaactttaaatcatacacttaaaactcttaatttctctttatcatcttcccacaggctctctgcctagtgacatgtaaaataaggttatcagtacctctactcttccttccacttttcttcccctcccttcttctctcttccccttccctaacttctgacagttgaatttttatttttattcatttacacaggacatgcagccatatcttaaagttgaagactcatcttgtccttctattttggaaaattatgaacaattctcccaaatactgttttctctaatattttgttctgcaactcctagtagacttagagtctctttgtcttttttacatgtctcttaatttatcttctcttttttatctctttatgtcttttatcctttatgttccatgttttgactaaattgctagtactgtctttcaattcactgattctgtcttcagctacattcaatgtactgtcccctgcttatttagtttttgtctgtaactttactcacatatttgttaaattttttattggagtgtatactatacctctgaaagaatatgtgtactgtcagtttagttcactatatttttgcagtctgaaaaatttatgtaacctgacacccaaatcaagaaacagaatattcccaatactccagaagccctctttgtgcttccctccagtgagtaacacctcccttgagtaatcactattctgacttctgaatgcatattttaattttacctgttttgtgttatatataaatggagttatcaaataagtactcttttgtgtctgggttctttcactctgtgttgtgagttttactcatgtttttacatgtagccaatagttctttcaatcttatcccataaggtatcatattgggtgactatacaatatttatttgtctagcagttatccatctacttacttattcactgttgatggagacagagcccatttagtttggggctcttacagatagtggtaccatgagcatttccagtgaagtagtggttcttgacccagggagatagtggggctgtcacagagacccactcacagagccggtagataccttggttctgtttctgttcttgaatccatctgcttgattcgttatgccctgatcctaacaaataattagtcattgggacaggaggtgagtacacgattgcagttcctggtgttaagcgatgagcctgtatcttctataaagtgttgttagtccccctcatccaggaggagtgagagttctagctccccgaggctgctttcggatccatattcctggcaggccatggtgtattttgcagctctgttccatttatgcaccacacatacgtttaagttgtatttgagcccagctgtagctttctagatctctccttatagtcattgctatgtattttatatctcagagcatgactttaccaaaccatcttaaccagaagtatttctttgaatctgaagactcctggatttcaggatatatttatgacttctttttttcttcctttgtttaagctcagaaaacttcttgtattacttctttggtcatttcctttccttcattttcactattctcaccttctaaaacttctagttgttggatttagatttctcttaaattttttactctgtattttttatctccttttcttcatttagttcttggttgggggaacaaaatatccttgactttatcttacagtacttttgaatttttttattttgctaaagagcattttaactttcttacaattggaatgttctttttcatagcctgctgtatctgttttgtagctttagcgtcttcttggatttctcttaagaaattgattagaccttttaaaaaaatgttcttctacttcctgaattatttgtgtttcctacagccttagttgttaaactcatgtatcttctcttttatttcagaggtttttcacgtattagtcaattcttcattgtcccttcatgtttaaggagaactagattgattgtggcacatggccaaactgaaattcctttggtggtgtttgcaggtttgcttccctgctaggcctctgctctgggtgatacagctgactagcagctttgtataaccggcagaacctgtccactggtagccgtctctttaggatggatggtgtggatccactgtcaggttggaggcaccccccaaatttaagaagaaaaaggatttattctgggcaccaactgtgatataagcagtcctggatcatttcagtagtttatttagtatcatagaaaagatcatttcaggtttctctgcttacttgttacaggtggggaaaataataaactgcatgtcctatgtaagagcatagggaggtgaggaggggaaaccattgcagctattcaaaatagacttgttttaaagcttttattttaagtacaggggtacatgtgcaggtttgttatgtaggtaaacttaggtcatggaggtttgttgtacagattatttcctcgcccgggtattaagcctggtaccctttagttactttataattcgtcctgatcctcgtcctgatcctcgtcctgatcctcgtcctgatcctcgtcctgatcctcgtcctgatcctcgtcctcctctcaccccccctcctccattaggcgccagtggctgttgttcccctctatgtgtccgcgtgttctcatcatttagctaccacttacaagtgcgaacatgtggtatttggttttctgttcctgtgttgtttgttaagggtagtggtctccagctccatccatgtgcctgcaaaggacatgatctcattctttatttatggccgcatagtattccgtggtgtatatgtaccgcatttttttttttttttttttttgagatggagtctcactctgtcgccaggctggagtgcagtggcgcgacgtcggctcactgcaatctctgcctcccaggttcaagcgattctcctgcctcagcctcccgagtagctcagattacaggcacgtgccaccatgcctggctaatttttgtatttttagtagagacggggtttcaccatgttggccacggtggtctcgatctcctgacctcatgatccacccatctcagcctcccaaagtgctgggattacaggcgtgagccaccgcacccggccccacattttctttagtctatcattgatgagcatgtaggttgattctgtatctttgctattgttaatagcactgcagtgaacatacacgtgcatgtgtctttataatagaacaatttatattccttttattatgtacacaataatgggattgctgggtcaaatggtatttctgtctttagttctttgaggaatcatcatgctgtcttccacaatggttgaactaatttacactcccgccaacaatgtataagtgttcaggttccttttcccacaacctcgccagcatctgttatttttttactttttaataatagccattctgactggtgtgagataatattgtggtttcaattttttctctaatgatccctgatgttgagcttttttcatgtgcttcttggccacgtgttatgtcttcttttgaaaagcgtctgtttatgtattttgcccactttttaatggggttgtttttttcttgtttaagctctttatggatcctggatattagacctttgtcacatgcataccttgcaaaaatttcctcccattctgtaggttgtatactgttgaaagtttcttttgctgtacagaaactctctagtttacatagatcctgttcatcaatttttgcttttgttgcagttgcttttggcatcctcattataaaatctttgcccattcctgtgtcctgattggtattgactaggttgtcttccaggttttttatagttttgggttttacatttaagtgtttaatccatcttgaattaatttttgtatagggtgtaaggaagggatccagtttcaatcttctgcatatggctagccagttaccacagcatcatttagtgaatagggagtcctttccttcattgcttgcttttgtcaggtttgttgaagatcagatagttctagatgtgcaaccttattttggggctctctcttctgttccattggtctatgtgtctttgtaccagttaccaggctgttttggttactgtagccctgtagtatagtttgaagtcaggtagcgtgatgcctccaggtttattctttttgggtaggattgccttggctgttggggatcttttttggttttcatatgaattttaagatagttttctagttctgtgaagaatgtcattggtagtttgataggaacagcattaaatctataaattgctttgttcagtgtggccattaaacgatattgattcttcctatccatgagcatggaatgtttttccatttgtttgtgtcatttctgatttctttgagcagtgttttgtagttcttcttgtagagatctttcacctgcttggttagctgtattcgtaggtattttatactttttcaggcacgtgtaaatggaattacattcctgatttggctcttggcttgactgttggtgtagaggaatgctagtgatatctgtatattgatttcgtatcctgaaagtttgctgaagtttttttatcaccttacgaagattttggaccaagacgatggggttttctagatacaggattgtgtcatctgcaaacagggatagtttaatttcctctcttcccatttggataccctttatttctttcttttgcctgattgccctgtccaggaccttcaatactatgttgaataggagtggtgagagagggcatccttgtcttacaccagtttttcaaggggaatgcctccagcttttgtttattcagtatgatattggctgtggatttgtcataggtggctcttattattttgaggtatgttccttcaatacgtagtttattgagagtttttaacatgaagcaatgttgaattttatcgaaagccctttctgcatctgttgtgataatcctgtagtttttgtctttagttctgtttatgtgctgaatcacattgatttttgcatgttgaaccaaccttgcatcgtagagacaaagcctacttgatcttggtggataagccttttcatgtgcttctggattcagtttgtcaggattttgttgaggattttgcattgacgttcctcaaggatattggtctgaagttttctttttttgttttatctctgccaggttttgatatcaggatgatgccgacctcgtagaattagttggggaggagtccctcctcctcaatttatttgaaatagtttcaggggtaatggtaccagcccttctttgtacatctggtagaatttagctgtgactctatctggtactgggcttatttatttactgtttatttatttggttggttggttggttggttggttggttggctatttgtggcttcctcaatttcagagttcattatgggcctgttcagggattcagtttcttcctggttcagtcttgggagggtgtatgtgtccaggaatttatccctttcttctagatttcctagtttacatgcataaagttgttcatatattctctagtggttgtttgtatttctgtgggttcggtaataatatcctttttgttatttctaatcgtgtttgtttggattttctctcttactagcctatttagcagtttattttattaatttttttttaaaaaataaactcctggactcattgatcctttatatgggttttcatgtctcagtgtccctcagttcacctctaatttttatttcttgtcttctgctggctttgaggttggtttgctctcggttctctagttcttttagttgtgatgtaaagttgttatattgagatctttctaactctttgatgtggacatttaatgatatgaacgtccctgttaacattgtcttagctgtgtcccagagattctggtatgttgtatctttgttctcattagtttcaaagaacttcttgatttctgccttagtttcattatttatgcaaaagtcattcaggagtaggttgatcaatttccatataatggtatggtttcgagcaaaattcttagtcttgatttctaatttgatcatgctgcggtctgagagagtgtttattatttcagttcttttgcatttactgaggagtattttctgtccaattatgtggtcagttttagagtatgtgccatgcgaaggtgagaatgtatgttctgttgcttttgggtggagaattctgtagattcctgtcaagtccctttgatcctatgctgagttcaggtcctgaatatctttattaattttttttttttttgagacagtcttgctccattgcccaggctggagtgcagtgatacagtctcggctcactgcaacctccgcctcacgggttcaagcaattctcctgcctcagcttcctcagtagctgggactacaggcatgcacgagcatgctggctattttgttctgttttgttttgtttttgtatttttggtagaaacagggttttgccatgttggccaggctgatctcaaactcctaacctcaagtgatctgcccacctcagccttccaaagtgctgggattacaggcatgagccactgctcctggccttaatctttgatctaatactgttagtggggtattgaagtctcccactgttattgtgtgggagtctaagtctctctgaaggtctctaagaacttgcttcctgaatccgggtgctcctgtgtcaggtgcatatatatttaggatagttagctcttcttgttgcattgaaccccttactatttagtaatgctcttctttttcttttttttttttaatctttgttggtttaaagtctattttttctgaaattaggatgtaatcctgcttttttctgtttgcttcgtagatttttctttatttattttgagtctgtgggtgtcattgcatacgaaatgggcctcttgaagatagcacactggtgggtcttggttctttatctagcttgttgcttggtgccttttaataggggtatttagcccatttacattcaaggtttgtactgatatgtgtggatctgaacctgtcatcatgatgttagctggttattatgcagacttgtttgtgtggttgctttatagtgtcactagtgtgtttacttaaatgcgtttttgaagtggctggtaatggtctttcctttccatatttagtgcttccttaaggagctcttgtaaggcaggtttgatagtaatgaatttcctcagcatttgctggtgtgaaaaggatctgatttttccctcacttatgaaggttattttgtccagatatgaaattctggcttggaatttctttaagaatgttgattattggtgcccaatctcttctggcttgtagggtttctgctgagaggtccgctgttagtctgatggacttgcctttgtaggtgaccttaccttaccctctagctgcctttaacatttttttctttcatcttaactttcaagaaccttatgattatgtcttgaggatgttcttctcatgaaggatctcattggggttctctgcatttcttgaatttgcatattagtctctctagctagggttgggaagctctcatggatgatatcctgaaatacgttttcagttgcttacgctctccccatctctttcagggataccagtcattcatagatttggtctctttatataataccacatttcttggaggttttgtttattcctttatactctcttttctctattattgtctgacttccttatttcaaaacgtcagtcttcaagctctgagacactatcctcaccttggtctattctgctgttaatacttgtgactgcattatgaaattcttatagtgtgtttttcagctctgtcaggttgattacatgttttttctttgctggctattttgtctgtcagctcctatattgttgtactgtgattcttcgcttccttgattttgtttcagcatactcctgcatctcaacgatctgcattcctatccatattctgccttctgtttctgtcatttctgccatctcaacccggttcagaacccttgctggagtggtggtgcagtcattttgaggaaagaaggcactctggctttttgagttgtcaagagttcttggattggttctttcttatctttctggggtaatgtttgttcaatctttgaacttgctgacctttggatagttttttttttcttcttcttcttttacactatttgatgaccttcagtgtttgattgtggtataaggtggattcagccaactgactgtttctggaagactttagggggccaacactcagctctgatcttctagactgtgtgctctaactttgggggacttatattgggcaatgactttgttctctggctcctctgaggttaggagtccactgtgctggtggggccgaagtgctccacgatcactggtcactacactctaatgggtggtgtctgccaaagtgcttcatagtgtggcggcagcaggatccgtcctcatttgcacatgccagcaacagcagcagcgcagcagagtgcacgctggacaactgtgacagggtgctagcaggtgccagggtgcctgcccccatgtaggcattcaccgcagtggcagaggcagctcagctggacgactgtgacagggtgctagcaggtaccagggtgcccgcccccatgtaggcattcactgcagtggcagaggcagctcagctggacgactgtgacagggtgctagcaggtgccagggtgcctgcccccatgtaggcattcactgcagtggcagaggcagctcagctggacgactgtgacagggtgctagcaggtgccagggtgcccgcccccatgtaggcattcactgcagtggcagaggcagctcagctggacaactgtgacggggtgctagcaggtgccagggtgcccgcccccatgtaggcattcactgcagtggcagaggcagctcagctggacaactgtgacagggtgctagcaggtgcccgggtgcccgcccccatgtaggcattcactgcagtggcagaggcagctcagctggacaactgtgacagggtgctagcaggtgccagggggtgccagggtgcctgcccccatgtaggcattcactgcagtggcagaggcagctcagcctggggggccagagagcccttgctggtgactgtgcatgtgatatcactggtggttgtgttaatacggatgtgggttactggtggggacaggtctctgtgtgccccaggcaggggtggttgctcagggttggggagggtctgctgtcctctgtgcctggtttcactcctgtggcagtgttggcacaagggcagggctggctggttctgtgctcaccaaggctccaactgcagtgacggtccagcagaaggggaacaggtggtagggtgcacacacacatgcacactggcagggcaaggaaagcaaaatctgtccacgtacacatgtgctggcaaagagatgtggaggcttgctgtaggcctgggggaagctgtaatgtgtggagaaagcaggcaggcctggtgcgtggccagcgtgtgaccgtgggggccagcctgcttgagttctctgccagtcaggcatagttccccagcacaggagctataatgacagcctccggggtacccaaggctatcctgcaagcaggcacagctaggctgtggtccctagagagtccagcagaccaagaggtgctcaggttggaccagccccatctgatgggcaagacctccagagttcaggtcttgcagaggttaggtccagttgttcccctggggctaaagtctcctatgggagcaagtcaagcctagggagatgggcttccctagccatgctccactacagactctaccacaccaaaccctctgggttccacctcagctgacgcgctgcccttgcttctctaagcagctctccctgccaaatcggtgtctgtggtagatgaggggtcatcttctgctggaattccagaggcccgtagcaagaacagattactcttcgtgagtacaactcgctcattccctcagggtcgttgggggctaggaacgagtccctgtgtgcagtagcccggtgcagcgttcccagcatcctcccctttcagcctgcttctgtgtgttccctccatccactctcactgccttccctctgaaggtctgttgtgccagtcagctcggtttctcgctggcagctgttccacctggctgcttttagtaggctttagtgcccttcccctcttttttaatatagagacagagtctctccatattgccgaggctcgtttccaattcctgggctcaagcagtcctcctcccttggcctcccaaagtgctgagattacaggcatgagccactgtgtccagcctagtactctcttttaaggatgtgttttccagttcttgttattttcattctaaggggtacattgccagtatattctaccttcttccaaaggaataaatacagattggtttaaaacatagaatattaacatttctatttttccttgaatgtccacttattcttttctttttcttttttttttttttttttttttttttttttttttttttttttgaggcagagtcttactctgtcgcccaggctggagtgcagtggcgcaatctcggctcactgcagcctccgactcctgggttcaagcagttctcctgcctcagcctcctgagtagctgggactacaggcgcacgccaccaagcccggctaatctgttttgtattttcaatagagacagggtttcgccatgttcaccaagatggtctcgatctcctgaggattataaatcatgctactataaagacatgcacacatatgtttatttcggcactattcacgatagcaaagacttggaaccaacccaaatgtccatcaacgatagactggattaagaaaatgtggcacatatacatcatggaatactatgcagccataaaaaaggatgagttcatgtcctttgcaggcacatggatgaagctggaaccatcattctcagcaaattatcacaaggacagaaaaccgaacactgcatgttctcactcataggtgggaattgaacaatgagaacacatggacacagggaggggaatatcacacactggggcctgtcatggggtggggggttgggggagggatagcattaggagaaataactaatgtaaatgaagagttgatgggtgcagcaaaccaacatggcacatgtatacctgtgtatgaaacctgcctgttgtgtacacataccctagaacttaaagtataatttttaaaaaaagaaacttgaagctttgggatcagcctggaatatttttcataaattctgttgacagtttcttgctgaatcactttgaatggatattcaaaacttcgtttgaacttaagaaaaataagaatttctttttgtatttcactgaatggtaaacagtttctactctcttctgggaattcatagatgaaaggggatggtttttacctgtccaaatctatggagaaatacacaaaacaggagattatattaataatatactataataatataaaggaagtatgaacagctttcagtgggagcttgtagagagagtttttcctgaaaaagtcaagtaaagataaaattcagtaagcaaaaagttaatgcgggccgggtgcggtggctcacgcctgtaatcccagcactttgggaggccgaggctggtggatcacctgaggtcaggagtttgagaccagcctggccaatatggtgaaaccccgtctctactaaaaaaatacaaaaattagctgggcatggtggcacacgcctgtaatcccagctacttgggaaactgaggcaggagaatcgcttgaacctgggaggcagaggttgcagtgagccaagattgcgccatcgcactccagcctgggcgacaaagagcgaaactctgtctcaaaaaaaaaaaaaacaaaaaaaagataaagcaaaaaatgcagggatagagaaaccatggcaaaaggtgctaagtgctgaatttaagtgtagaacctagactcaatctgagaggacatcatcccatgtctgcctggtattgtacagaccctcctagtcttttagctagctcttaaaggataaatcagagaagagagcgttgcgcgtattcttagttgataaaatagcagatgaaaagtcacagaggtatgaaatattaatattaatgtgtatttgaggaactataagaaatttagtattgctagagcaaagaatgtttgaggagaattttgaggaaaaggctagaagggctttctatgccatgccactaatttaaattgctattctatagcaaggaagtgatgtgatccaatccatatttcaggaagatcgtgctgaccctgtaatccattacatgaatgcagacagtaacactctcaaaatttattaaacacacttaatgaaataaataccagtatctatgttatctgccttttttgcctgtcactcatgcggtcctcacaactccttccagcccctaaactaatcagtccgggcattagagagctttgaaatgtttattaagaaaacagtcctgttttgacagacaggagttagagcacctggacttaaagcaggctttacagctctactggggatctctcatgtaggcaacatgaggccagcagagccctgtgcaaacaggcatcataagcaaatgaccatttcttttccattatagacttcatccttcaaaagggagtgccattcgtcccaactagtattttccccccttttatctgtgtcactaatgctaaattagttcatgggtcattcaaattctagcagctttggtgttagtctttatatttcagttccagtgctccgctgattattttggcatgaaactatcccatacagtcatcatgctgcttttaattcaaaagattcctatgagctgcaccaggaatatcgtatctagtacaaaaactgtatgtctgttcttccctgaagcagattctcttgtaacttgagtttagttatcttagtattgatattgagttatttttagagagttctgtggtggttagtggctcggtgttttcatcagtcgttcacttaactatcctttcggaacatctgtgccacttacgctgtctcacttctcacccaagtcttagatgctttttcattcttcatattactaggaaagattaaacacatcatataatgccagtgactgcaggactttcctttaaagcttctaaactacctgccagtatgctgaaataaggtatattctgaagcttatcgtttaaattgtagatttcatatgtaaaaacattttttttttttaagacagtcttgctctgtcacccaggctggagtgcagtggcgcgatctccgctcactgtaagctccgcctttcaggttcacaccattctcctgcctcagtgtcccgtgtagctgggactacaggcacccaccactgcacccggctaattttttgtatttttagtagagacggggtttcaccgtgttagccaggatggtctcgatctcctgacctcgtgatccccccacttcggcctcccaaagtgctgggattacaggcgtgagccaccgcgcccagcctgtaaaaacattttcatctttgtttataaataaaacatctgattatacaacaatacttttatgggactcaaagaggggagtcagggttggggtggggtctgtcatttatttacttatttttaaaagatacctggcctggttctgtggcggtggcttttcttcgctaatcatgagctgtactttgagtatgcagtagattccgtcagcatctcagtgggagaaaggggggaaagaggggttttaacacagtgttctctttgcattgagtgaagaagctgttgatctctgaaggaggaaaggagagactggaaccacatgaaggcttgtgctgtgaaaccctgaaaccctgacggtgccttttgatcactgtgttttaacaaagctgacaatcctcagccacacaaatcttgggaactaaaataagtattcatttaactcttgactaaaggttaaaagatacagttaaaaagaaatctaaaacccagagtggtaattccactttttctttctctttctgttgttggaacctgagctctctaggaaaactaacatttgttaagggcctgccatgtgccagattcctgtctgtaagagaggtataattattattttacactatctcaatcttaataacaactccgttaagtttacacatttatatttccatttgacagttaaaatcaaggaagttcaggaagctgcttgtctagggtcatacaactagtaagcggcactgtccagctccagaacacatgctttttcttgtgtattttagtgctccttcagtcacttatatgatttacttatttgttattcttttataaatttaagcagtagtacaaagtagaaagaataaagaaaaaaacagcccccaagtcaattgcctagaaaataatcattatttgtagtaggtaagcaggattcctgtcatattcctatgcacatatagaaaaaaattaacatataacatgccattttaaataaaaattgaatttaattttacttgacattagcagaataaagagaatttcagtagaatatttcttctttttttttttgagacggagtctcactctgtcgcccaggctggagtgcagtggcgtgatctgggctcactgcaagctccacctcctgggttcacgccattctcctgcctcagcctcccgagtagctgggactacaggtgcccaccaccacacccggctaatttttgttctattttttagtagaaatgggatttcaccgtgttagccaggatggtctcaatctcctgatctcgtgatctgcccgcctcggcctcccaaagtgctgggattacaggcgtgagccaccacgcctggccagaatatttctttactataaaggagaattcctaagccatccttccaagtttaagaaaagagatagagattggggttatgttttacaacagcatcttttatttttattttaatcagtattaattcatgccatgctctaaaagatgaagaaattatcacttcttctcaccagtttttaatgatatagttttatatcagctttaccaaggtttataatatttacatcttattttataactcccaggctacttagtctgggagttaaattcagcacttaacaccttttgccacattttccctatccctgaattttttgctgtatcgttttgcttatttaattttatcttcacttgactatttcaggaaagactgatgctgaattctggttttcttgttttatgtttgcatgcttgatagtgtttatttgccattctacttgaagtattacttagctagttacgaaattcttaggtgtgttcttctaatgcagagtggatgaatgttcccggatgctctcttcctgccatcactgcatctgatgttgcccctctgagttagaacagaagggccaggaattgacttcagcctgcttttctataacctgggaaatgtgaggagctaggactattctcagctggatctccactgtctttgtggaaggcctggactcaagtttttgttgtttgtttgtttgtttgtttttcctgaaattttgataaatatcctgtattcatcctggtaagcatgagaaggttcagatcgtctgtgaaattctttagagattgctagaaaacagcatatcctagtaatttttcttgcctttatgaggttgccatagttaaatgttttgtcctgactcatctcttaaaccaccagtccacccttttccatctgtttttctccacatttggggatattactgggaattctcacagttttatcacctcacttctgaattgcttctgggcttagaatagggtaaagagcaacactatttttcaccaaaatttttgttgattttattacctgcagcccaacacaaaaatactgacaaacctttcatttctaggagaacaactgattgaccctaatagaaaaaatagactctatcagtcaggtattccagtgtataggaaacagcgtgttgtgacatttgtttatttaagagatgatggttttcggccgggcgcggtggctcacgcctgtaatcccagcactttgggaggccgaggcgggtggatcatgaggtcaggagatcgagaccatcctggctaacaaggtgaaaccccgtctctactaaaaatacaaaaaattagccgggcgcggtggcgggcgcctgtagtcccagctactggggaggctgaggcaggagaatggtgtgaacccgggaagcggagcttgcagtgagccgagattgcgccactgcagtccgcagtccggcctgggcgacagagcgagactccgtctcaaaaaaaaaaaaagagagagatgatggttttcaggttttttgggttttgtttgttttgatcctttgaggatggtatgttgtagtccagagaaggtatttagaattgtgacaaggtaataaaattgagacaaacacgattatttatctttgtcgagagtcactcctggcaattttcacatggaccttcgttgaaatgcatcattgaaatactagcgtacattttaggtattttactgtttcacggtatgcttattagtcagtgtaaaatgcatcctaatcaaaattaactactttgaaaagggaagttgatcgcttcttggccatttggctaagatcaactgaaaagggaagtagagataatatggtacagcaatttatttttaaaacaattagtttttttaaactgacaaataaaaattgtgtatgtccatcatgtacaacatgatgttttgaaatatgtatattttgtggaattgttaaatcaagctaattaacatatcattatctcacatgcttgtcatttttcatggtgataacacttaaaatctatactcagcaattttcaagatgtagtaatttctatatagagaaaatctgtagaactcaggattgtctattttgaaggttcttaagatgtatttccaagaaaatacagtataaattttgtgattgataccacttttcatgctagccacataaattgtcctttttgctcccaggttaagaattcaaggcttacaaaaatgaacacaaggctgggcacagttgctcaagcctgtaatcccagcacttgggagaccgagacgggcagatcacctgaggtcaggagtttaagaccagcctggccaacatggtgcaaccccgtctctactaaaaatacaaaaattagccaggggtggtggcgcatgcctatagtcccagctactcaggaggctgaagcatgagaattgcttgaagccgggaggcagaggttgcagtgagcagagatggcgccactgcactccaatctggtcaacagagttagactcggtctcaagaaaaaaaaaattataattgaaaatgaacacaggtttcttgtatgtctctccacttagttgattctctagagtgtggtacattttacaatgtgttgtctgcagtgtttatttacattgtctggcatgctacaaaggttggtagcatttgctaataaggaaccactatgtgaccagtgtaaatgatctaccagtgcctcttcctggtttcgatttctttcctagcaaaatacgggtataagaagtgaaccagacgtctttaagaaagagtatgtctgctactcttgtttccaaaagtgtttatatttattcattaaagaacttttgttactgaattctttttaggaaacttagtgaaccatacactgcctgtatggccaatgatgaagaatcagcttaaggggaaaaaatgtataatgtccagccaggcgcagtggctcacgcctgtcatctcagcactttgggaggccgaggcgggcagatcacttgaggtcaggagttcgagaccatcctggccaaaaccaacatggtgaaaccccgtctctaccaaaaatacaaaaattagctgggcgtggtggcaggcgcccatagtcccaattactcgggaggctgaggcaggagatttgcttgaacctcggaggcagagcttgcagcgagccgagattgtgccactgcactccagcccaggcaacagagtgaagactccatctaaaaaaaaaaaaaagtataatgtctcacaatataatgcaacaagatttcctactcaggacttacaaagacctgtgtctcttaaaatacacgggtcaccggaatgtaggttttttggtaagtgctgagcattcctatattcatttccttcctctgttttatgattcactggaaagcttcaagccttgaaatatttctgatttgatttttgcaatatactttttcttcccattgccatgctcgtatttctgcacacctcatgtgcttatacagtccaatcattttgatgacttggggaggtgtgaagaggctgagctagacttcatattttctcctgtcccgtgttcttattgtaaaggaatgtagtaatgcactgtgtcttttttgtgtctgttgttggctacatgtcctcaaaacatattcaacaagtagacgtctattgaaaagaaattttcctaagttgtccccaagaaaacgacgacactggagtcagttccgtgtttataacagagtcccaacacttgtttttctccagggtttctacaagaagaagcataaaacagtgttagtatgtgactgacctttggcttcaaggcttcagtaaatccgtaaagtgagattgattaggattaatagctttttgtcctagctaaaaagtgttcgagatcttggcttaaaaagagttctttttggccgggcacagtggctcacgcctgtaatcccagcactttgggaggccgaggcgggcagatcatgagatcaggagtccaagaccaccagcctgtccaatatggtgaaaccctctctactaaaaaatacaaaaattagccaggcatagtgccatacgtctgtagtcccagctactcgggaggctgaggcaggtgaatcgcttgaacccgggaggcagaggttgcagtgagccgagatcatgccactgcactccaacctggacgacagagtgagaccgtctaaaaaaaaaaaaaaaaaaaagttatttttgataccttggaatgtgttggccgttttaggtgcttccagcattttattcaaagagttgagaacataaaaggatagcttgattatacttagaccttaaaaaacttttaggagttcatcaaacacataacctttacaactggttagacttccagctttcctaaacaagagtatggcactcttgccagtgttggtttaaagtacatgtaatttacataaaatagcactgactgcagcctaggtctctaagcagagaatgctctgacaactttgtctccaggtccactctactgttccttattgaggagggaaaccaggttcacagtgttgtgctttcttcttttggcaccaaaaggggctcctcctggtttatgagttttaaaggatgagggaaaaattcatcatgggggatgttattttcctcagtgggtaagtgaagtcagggaaaaacagaaaacaatggagataagaggatgggatgcgttcagtttattctgttgttctcaccacagtaattgactcagaagggactcattctgaatttagtatctagtgttaaaagaacaggcctggggcaggcggaggccagcactgagacacagtggtgggttgagacctattgtattttttaagttgttccaaggctgtccaggtgtcctgatttaaagcctgcttcttaagtcaggaaattgtatcttgttctgaggtttactgtaataaagtacacagtcctaggggatggtacttctggctccatgaatcactttacaggctggctgtactgacccaagcctcatgatttatttatgccataccacagtaggaatggcaaatatgtaagccacacatggtctatgggatgggcctttaactgggaaactgccataaatccgtgaagtcaggtaggacagagccagcaggagctcatgtcgtgtacaagatttcttcctgttttatagggacttacagttctagagctaattaagttcatcctccttagagtgtatctgtcttagtctgttgtgtgttgttataaaagaatatctgcgcctggataatttataatgtaacaaggtttatttagctcatggttctgtgggctaagaagttcaagggcatggccctggcttctggcaagggctttcatgctgcgtcacaaaacagcagagaaggtcaaaggggaaggggacacatgcaaacaggagaacctgagggtccatcctggctttatcacaacccactctcctgggaactaatctgttccctgcaatacctaatgcagtcttgtcagagtgggaactcactcactaccacaagatcagcaccaagccattcctgaaggattcatgcccctgtgacctgaacacctcccatcaggccccacctcccaacaccatcatactgggaatcaaatttcaacatgagttttcgtggggacagacaaaccatatccacaccatagtgatatccttggactttttgtgtgctgtgtttatccagtctttgatttactgcttacaaatctaaagaatagctctgaaatatagtctagtcctattgtcactgatattttctcttcgatttatttctataaagtgttgcccatgtttttcaaataatttctatgttttgagtaaatactaaggagtgcgatggccagatcttaagagtatgtttagttgtgtacagaactgccaaactgtcttccaaagtgctgtaccattttgcgttcccaccagcggtgaatgagaattcctgttgctcagcattcttgccatcatctggtagtgtgtgttctggattttgtccattgtggtaagtgtgtagtggtatctcattgttctcatatgcatttcctgattacgtatgatgtggagcatctttttgtatgcttatgtgccatctgtatatattccttggtgaggtgtctgttaaggtctctggtgcattttcttccttttatcttgttttatttttgttttttataatattttcaatttttaattgatacaacataattgtacatatttatggggtacatagtgatgttttaatacatgcagtgtatcataaggcccattttttaatcagatcatttattttcttagtgttgaattttaagtatcttttgtattattttggataacagtcctttatcaaatgtatcttttgcaagtattttctcccattctgtgtcttattttctcattctcttaatatttgaatatttaaacacatattatttataaattaatggtacattatttataataatggttaaacggttggtaagtaaatcactgctgagtatatactgctttgaagggcccaaggatccattaggcctccagctttaacccagcacagcattctgaaatacccaattctccccagagtttcaagagtcaccaggccttaaccttcttattgcctcaaggactcttagagctcaccaggctcctcctaccacaagccttcatcatatcaccctgttcctgttgcttagggagctttctcaggatagcatttcaagattgagtacccatcctagttttctcagtgttccttgtgagccgtgtcacatagaaggcatttaataaatgtgtgctgaactgagctgaaccagcaagggcaaaagggatttaagagactgccgttttaattgaaaaggagtaaaaagacactgggaaaggcagcatgtattgggggaatatgagaaatttccaaatcactggaccatcaggctggaaaatttaggttggagccaaactgcaaatggtttgaatgtcatcatgtatagtttatgtatttatatatacttacctttctcatagaagggtgaatttttatattataatagctagaatgttcttagaatttatcttcttaattcagaaaacatcacattgagatctgtcagtaaaccccccacacacacaaataatttcttgtcctcattgaccttcggtctgagctcttaatgcagttttctctactacacttgtccatgcacatagtggtcgcagacatttgagagaatgaaaatcatgtgtttaatgagagattgttatcggagactgtagcacttgttttactttattctttctattgctttttctctttttgtttctttcaaagtacatacaaatacatattcattatatcctatgtaagggaatgtgtatttactctagaataggactactttaagtttgagatggctttttgcttttaaaaatatagatgagtgtgatttaggcatgtatattcagtcagatcttttagctctcaccttgataaaattattgggtacgagaagcaatcaagtcttcttttcttttcttttttttttttttttttctgagatggagtctcgctttatcactcaggctggagtgcagtggtgtgatctctgctcactgcaagctccgcctcccgggttcacaccattctcctgcctcagcctcccgagtagctgggactacaggcgcccgccaccacacccagctaattttttgtatttgtagtagagatggggtttcaccgtgttagccaggatggtctcgatctcctgacctcgtgatccgcctgcctcggcctcccaaagtactgggattacaggcgtgagccaccgcgcccggcctacaaataatgctttaacgctaaagagacaggagaacattttcaaatattttaaggacagttatttgaaagaatgaatttcttttatggagcttaaaggaatagaactagggttacaaagagacagctctttcagtcttaataattatgcaggataataaaaaatataaataaaacttaaaaacagagagcttttgggatcagttctataagtaatttcctaagaggttgtcaaagctggtataggcaccagctcattcaatgtgtttaaacataggctggggggccacttggcagccatgtggtgtggaacacaagcaagccgtgattttcatgaatggatctgttctgtgaggtctcttgttatgctaagagtttgtgattctggttttgttttgtgtgatcttgaaagactgatttatgatctctttccacttgtttactgctgtttactgctcagcccattgcaatatagcttctgcctccagccctgaaactaccctccaaagtagtaactttcgaaaaactaaatccgatggaaattttgtattctttatcttgacctgcctgtgaatctttaacatgttttatctcttcttatttctggaaactttctttatctttggcttccaggggaccaccttctttttgttttctttttcctctaagaccattccccctcagttcttcatagacttcttccaccagtgctgtgtgccccgcctcttatcttggtggtctcgtgtcttatcttggtggtctcatgtactcctgtgattttaattactttcagtgctgatcattcccacgtagtctttaatcgggtcctgattgcaggactgtcagtacaactgcctaccaggtatctccccagattcataaggttgatgtaaagattaaattacttagttaaggccaggtgtggtggctcatgcctgcaatcccagcactttgggaggccgaggtgggccaatcacttgaggtcaggagttcgagaccagcctagccgacacggtgaaacccctgtctactaaaattagaaaaaccagctgggcatggtggcaggcacctgtaacaccagctactcaggaggctgaggcaggagaatcatttgaacctgggaggcaggggtttcagtgagccgagattgccccgttgcattccagcctgggcgacaagagtgaaactccatcttaaaaaaaaaaaacttagttgaaggtgcctagtagaatatctggctctatagtaatcatgctggcaatgctaattatagtgagtgtttacccagttcattcatactcttgaagaatcatttatttatccttttcttgggtcagggcgcaacagagccttgctctgtcatccaggctggagtgccgaagcgcagtgtcggctcactgcaacctccgcgttctaggttcagttgattttcctgcctcagcctcccaagtagctgagactacaggagtgcgcccggctagtttttgtgtttttgtagagacggggtgtcaccaagttggccatgctggtctggaactactgacctcaggtgatccgcccacctcagcctcccaaaatcctgggattacagcagtccgcccactgatttatctttaaatcaccacttcccaaactgttttctcttgtactagtatccctcaaggtggtaagtgatgttccacccagaaaagagagaaggtggggttccatgatcagttaagtttggaaaatactttataggtagggttggaactttttcaggggccagattgtaaacttactgggctctgtgggccatttggtctctgtcacactactcaaatctcttgtagcaccagcgtagccatagaaaatatataagcaaatgagcaaggttttgttcactaaaattttatttgtggacactaaactttgaatttcatataattttcacaaaatgtaattattatatgttatatgctatattatttggggttacaaaagtattattattttcttttttttcaaccatttaaaaatggaaaagccattctttgctcatgggccatgggctggctttgaccatgagtggcagtagcttgctgattcctgctttaaaatatagccccctattaaagatatgcaacctacaccataaaaagcttttctaagttctgcagcagtgctgttatgaccagtgttcctcaaacatatttgaccgtggaaatcttttgtcatgcttatttgttactgtctcttgctgtacttctgtggaatgtgcttttgagaaatactgacctagagaatagctatgtatgccagaggtaaagtttggcctgtggagcagactgtaaataacaagagaaagcgtcttgtctttattcctcttgctctgatcgtcagctccaactggtcacagacagaatggtattttgggaaactgaattcactctacgaggtgggcaccagtgaaccactaaagctgagtcaaagattagctgaattgagggtggacatgatgaagttaattccgtcaaccagcttcagaaatgggaaaaatggctttaacgtaaggtaaaatagaggtgctctaagtgagataaaatactcggtcctggctgggtgcggtggcttacacctgtagtcctagcactttgggaggccaaggtgggtggattgcttgagctcaggaattcaagaccagcctgggcaacgtgatgaaaccctgtctctacacacacaaaaaattagccaggcctggtggcacatgcctgtggtcccagctacttgcagggctgagatgggaggatcgcttgagcctaggaggtcaaggctgcagtgagctgagatcacaccactgcactcctgcctaggtgacaaagtgagactgtcaaaaaaaaaaaaaagtgtgtgtgtgtgtgtgtgtgtgtgtgtgtgtgtttatatatttatattccgttgaggaagaagagatccagaggtcatatgcaaaatataaacagtaataggtatcaatttctatagttttgaaatctttactgctgttgttttaaaatatgcaaaagtttaaaacttaaaaaattgagtttatatataataaaattctaaaacttgctttgaaataatattttcagttgctgtttttgtgtgtgtgtgtctttgagaagtaggatgtgtgactcagtagggagtaaaggttattgctttactattttgagcatatttttccctaataaaaataatgccatagctaaggagagaaccttcaaattaaaaacaaaaacactttcattttaaaagtctacgcttcccatctttttatgtctactttaaccgtatgccccttattaaaaggaaaaattggtgtagtaagcattgtttttaaattctgtctggcatttggcaagcagctagaacctataggaggatgcagaaaagatgggaccatcccagctgatgagaatttatctacctgatgcaggcatagtcattgcccattcccacagaatttacataccaggtgtctcattccaaacctgtgtaggagaaaagggactcttatagtttttgccaacagattgatagctgatgaataataaaattgttgaatcattaatgcaagaaggtaataaattaccgggtttgttttcatccatttggccaacaaatgtttttggtgacctccaagatctcagtagccccaatgtcttcagtactctctcagcatcccagcatgcactcatatatatccctgacagctttcataagcttcctatacagctataggagtatatctcggatacttacgcattggagcagctcctactttttttgtaagtgtaccacaaatcccaaaattagatgttctatgtaacgctggctattttatgagatcaagacacagttggatcttgattttgctggaggtggagacctgagtgccctgacactgctggcattcttctagcaaacgtcatgacaaacagacgtggaatgcagcacaggctaaagaaaggcgagcaagccccctcggtagcacagtgtggacagctggtatggacatgctatccatctaaaactgggaaaggttaaataaacagtgggacagtgacaaagtgcagagattaattgccgaaagcattcaataattcttaaaacagacatctaaataagcagaagcattctggagtttgagttctgagagacaatgtaagaagactttatttacttttggagacagagacttcctaaggaaagaagacaagataaatggtgtagtccaaaagtagacatatataacaacaggtgtaccttagtttgaagggactacatcttcatatgggaagattgtattctgaaattttctgttcatattacatacactataaaacatgaagcgtaaaggacatactgttgtaaaataataaagacaaaatgagagaaaaggccaatataaatctttttatcagaccatctccagatgttactgtgaacctactacttagcttcatctcttgaggctcaagctcagcttcccctcctccaacttcatccccagatctccagcgcagatcagtgggtttaagacataattcagtagagattttgataggatttgagtaaatccctaacagaaactcccttggcttgccagctatttttaaaggcagatatgtagaaagcagaagatcctaaattcacctatctgtcttgtgatagcccttgccaggaaaataggagatttgcccaagaatatattataggatgttcttgtggtacatgcctgtagtcccagcttcttgggaggatggcttgagcccagcagtttgaggctacagtgagctgcgatcatgcctgtgaaaaaacattgcaccccaacccggacaacatagcaaggccttgtctgttcaaaaaaaaaaaaaacactaaacttttttttttttcaaataatacattagatagaaccaacccatagaagtcatctctgcataatatttctaagtccaataatgatcaacattatgagtgcctgcaatatcatgagaatttaagagtcaaaagttactttgatcattttcactatggaattgaaagattctttttatatacttattggattaggaaagtacatacaaatgctaaaaatccagtcttggcaaggatgtagggaatcagaggtatgtaataccttaatgttggtcttttaaatcagctcgtcttcctctaaaacagtggatctcaagtatagatgtccattccagaaactcagtaggtctggagtagagcacagacttccattttgaataatttctttcatgtttgagagccaccattgtaaagcaaatctgataccatgtaataagctatacaactctccacagccgctgacctatttgtgagcccttcttgggttctgcaggggaaagctgcttcccgctcatagactgaattatgtcttaaatccactgatctgtgctggagatgtggggatgaagttggaggaggggaagctgagcttgagcctcaagagatgaagctaagtagtaggttcgcactctggattgattttcatatgctaaatcatttagaatttccatatccattttcacttcaaccgttatagtttggcatgacataaatcttcttacatcgacaaagataagagtttgcttcattttttcattctggtgtttgggagtaattttctggaggaaaatgtcactgataggtctttgctctgctgccttgaagtcaggaatccaaaattgtcattagtactatattggagccctcaaaactttgaccaaggtggggaaagaaaaagcataacagcttcagggaaaagtaggctcagtcgaggctttctccctgaggatcagtaattgtagcatggtgaggggttggataatcaatcattttaggtcaaattaaacatattttctttacgagttctgtcaaaataggtagacatgaggtagaatccaggagtcacttctacactcaacagaaatagagacaactcactagaactaagactgtaaggaacagtctaagatggtcttagttcattttattgctgtaataataaagtaccacagactgagtaatttataatgaacagaaattttggcttatggttctggaagctggtaagtccaaaagcaaggaaccgacacctggcaagggtctttttgctgtgtcatcccacggtggaagggcaaagagggtaagagaaaggcggaaggcaggtaaaaggaggccacaccccgcttcctcgttaacagacctacccttacaataatggcattaatccattcatgaagacacagcggtcatggcctagcataccctaagcgttctacctattaatactgttacaaaggcagttaaatttcaacatgagtttgggagggaatagtcaaaccttggcccactcactgaattgatgttgttttcctttctgttataatgtttcaccgtaaactgtagttccctacatattatattgaaaggactattggtctgtatatatttgtgtatcacaaaagagttacgtcatctttagagtcttctaacatggagaatatatagatacattttatatacaatttgatagttaactaattctatagatgcaggcttttttttttaaagaaagatactatgtgccattattttgcaaattaatgtaaatcttaaaaatttttagtggattttattctaaacagtaaataccaaatgagcagacattgtcgtaactaggtactcccttctcctctggcatcttttttgtttgtttgtttaagaagacattctgaggcttattgtaatttcttaatttctcttctgatttttaaatttcagttatgttgtctgttttactattgacagacattgttaagtataattcaaaagtaaagaagcttagaatataaacagggatctggatgtcattcagcagaagtgctctctagtcatgaagaaaatgaagcttggctatgaagtagaagaatctttctatcaaaaaataagaacgttggaacttaggatccaatagagtcgcacaatagtcatataggtgattttacacttacttcattggggctgtcatggctcaaatatatttgtgatccttttcttggaaattgctttcagagccagtttgcaggatgcccctaaaaataaatatgcacttacacttcactgtaatccaaaacctatcactctgattcattgtgcacaagacttggtgtcaaaattaaaattcagttaataaaaagggtatttgtcataattccaaatatttaaataatgcaataaaactgtgaagcttaaagagaaatttggcagcatcactggaataaatttttgtgtaacttcccaaaattaattccctgaagaatatatctttcatttcaaatataagtacaagtatattttataaaggaagcagctagataacttttgctaaagtaacgtttaaggaaatacagggctgggtacagtggcttacacctgtaattccagcactttgggaggccaaagtgagaggatcacttgagcccaggagagcagcctgggccacatggtgaaaccccctctctaataaaaataaataaatagaatagaataagctaggtatggtgatgccagctacttggtatgtagtcccagctacttgggatgctgatgtgggagaatcaccagagtctgggaaatctaggctgcagttgttggctatgatctcaccactgcactccagcctgggtgatgggagtgaggctctgtctcaaaaaaaaaaaaaaaaaaaggtgggcatggaagatgaatggaagatactcaaagatagacccacgaaactgaggatatgctatttcagtctctggactaaaaaaaattgcctgttttcatggacacaggaaggggaacatcacacaccggggactgttgtggggtggggggagggaggagggatagcattaggagatatacctaatgctaaatgatgagttaatgggtgcagcacaccaacagggcacatgtatacatatgtaacaaacatgcacattgtgcacatgtaccctaaaacttaaagtataataattaaacataaaaaaataaaaattaaattaaaaattgcctgtttttattaaactagtaaacaatttgtagaaatgcatgatttgattaaatgagttttgggtgccaccttcataagggaagctagaactgtgcttaaataccaggagccctgctaccttcttaatcttgagcactaaaactaagacctatatctaaaaacttagcctaaattcgcattccaccgtcatgaatatggaatgaaaatctctcatgaagttggttttcatgaaagtgcctccaggaaagcaaaactctggaacattgggccacatttataagaccgtgattattcattaaaaaactgaggatgtaatatttggaaggcctttacttactatcaactcatcaacagtatgggatgaaactagcagcttgactttctgtatgaagtatgggggaaagagtggaaagaatgtcagagttcactgggaccttctttagagccatggggctgaattttatttaaaatattcattggaaaagcacctggattccaatgcttcttaaagtcattctgtttttccatgcagttcgttatttgcttttagaccttttatctccaagttgttttatttagttgctagtatttcttcaggtgtcattatcttgcatccctctagaagataagacacactattgtgtgcatgtgaaattagaattcctataaatatctcattcttgaacaaattttcagtatcaccataaatgatatttaacactaagtggccaaaaacaagtcattcacagagattctgcatcatattcagtctgacagcactgaagctgtggttgtgtatttttaactacacttaatgaaaaaggacatcaggactccagcaaagttgccagcattcaccaggtcttatgagttcttctgccctagaccttttctcatctgctctgtccatccgatcttggcactcgccagctctgccttcttagtccagcagtggctcgataagaaccgttgatcttcagagctctgtctctctctctctgtctctctctctctctctctctgtctctctctctctcgaagagctggaaaagaggactcgaggaaaaaatattcatagggtaatttgtatcttccacattatttaaatttggaagcataaaaatacattgtgcttgaatcatgctgggtgaaataagccagatacaaaaggccaaatgctgtgtgatcctacttatatgaggtacctggagtagtcagattcaaacacagaaagtagaatcgtggctgccaagggctggaaggggcagaggagggtgttagcctttcataggtgtagagtttcttttcaggaaaatgaaaaatctttggatatggatggcggtgacagttgcacagcagtatcagtgtgcttaatgccacagaaatacacactttaaaatggtttaaaatggtcaattttatgttatctgtatttgactataggttaaaaaacgtgcttatacttatcatgtttgctatatgagaacattcctcattcagaagattttatggttcttaaagtaacttgattaaggaataatataaatacaataaagtgcgaacattttagacatacattttggtgagtttgtcaagctacagtcatttccaggagcttctgtctgccctttctggtcactcgccatttcccactgcagtccctggcaacgactgatctgcctccgatccttgtggattagaatacagttcatttttatattttttaaacaaatttggaatgtacaaacttttgttttttgacaagtagagatacagatgtcgagttttttgcccatctgagaagcaggtagaggctttatagcagaggtctcaatagcacagtaaaactaagtcttctaaacttgccataatcttatgaacatgctcatttttcagaaaaggtgaaggaaaaaactgaacgcaagttttccacctacaattttgttcaatcaatgtcatttactgagctataatcaccagcagtttctgcctttataatgttaattttgatctttttcaagaacttgtgaaaaatggaagtcagtccatattgggataacttctctacccattcccttgtaagtgtatttctttccttttttttttttttttttttttttctagagacagggtcttgctctgccacctagactggaatgcaatgtggtgccatcacggctcactgcagcctcgacctcctgggctcaaaggatgctcccacctcagtcccccaggtagctgggactataggcatgcaccaccaggcccagctagttttttttattttttgcagagatgaggttccaccatgttgcgcaggctgggctcgaactcctgggctcaagtgatccacccgcctcagcctcccaaattgttgccattacaggtgtgagccaccaagcccaaccatgagtgtatttctcactgtaggtcagttcctttcccttgtttcaggagatagagaaacatgagatgagcagcaagtgagaaatcttggacattgtgctttgcacaggacttgccattgtgctgcaggagggctgtgctaggcaggaccccagcgtgcactgttggaactatgccctgaaatagtctgtatttggtgacctttgaaagtttctttgtagcatttaagcgtaaatgtgatagttattttgtgttgcatattcattgactagcatagcagtctttcatttagagtcctacctgcaattcttgaatccaagagtcagacagcagcgttttattcttcattctttaggaactgtttttgtaatataagatttttacttctaacacatctctagcagtagcatcctggcctttccccttgcagaatcttctaatctctcctcattaccttcaactcagtctttctaagaccttgctttacttctctaaaacttttggtatttctatattacgtacaaaatcaaatcacttctcattcagcatttttgtgtaccctctgcctgctgggttctggttaaaaccctcaaggatttcacattctgtttattccttaggccaccattccagaccatctctactctgatttagagctgcctcttcagcttctctgccatttcctgtccctgtagacactctctaatccagttctacgatgtgtcctcacatgtgactggtgctttcacacttgccactctgtctttcttatttctctgtcaaaatagggcccatgtcagttcccacgtccttagcctgaggtgatttctctctgctgtactacctcagcatttactgcccatacagtatatttggcacttagcatttattgtttcatctcattagttatattaaaatcttagagttgaaaaggacagtctcaccactgaaaacaaaattacttacacaatatctctgataatctgtttaaacacctagtcatgggaagatctataattttttagctttccaactctacttactaacaaatattaatacactagatgttccttttataaaccaaaatctctctcttttgcgacttcccctgctttagtaacaattgtgccctctggacaaacacagattcaatgttctgtttttgcaaaacctaccttaaaaattttggtagaaatgattgtgctatgttagtaaatctttttagattaacatagccttatataatcccactatgtcatcttcctttgataccttctacttgtgcaccccctcttaaattatgacatatagaattgaacctagtgaacctaggtgttcagttagagaaaaacacagctctttctttctttaaatgaaatgtaagttgcccaaagctcatggtttctttctagttgtggtttatgtttatcttccttacgtgctctgctcacttgcctagacgctactggcctggaaaaaaaaaaatgccttaaaagtgcagtgaaatacagcttcaggataggtgaaaacactgaacagcgggggaaccaccacaacagatagaagtgaagtcagaatcagaggtgcagttggttcaagatacattcattatgagcctactctgtgctgggaactattcttagcatttggaattcattacagaataaaacagacaaagatcctgtctttgtggagtttgtattccaactattcctaagcacaggctttgggcaaacattgaagactagcaaagtatatcagcgtattgagtatagagtatatagagtaactgcagccctaaataaaataaaacaagaaagcttaagcagtttaggctaatgcaatgcagaacatgaacaatacttgaaagcttttagttttcaagtttaggaaccaagactctcgaaggaagacattttttaaaatgtaaaaatagcagcataatacctgaaagatagacacaacccaagtgtccatgttggataaatggataaacaaaatgtggtatgtgggtgtggtggaatattactcagccttgaaaaaggagattcagccacatgctacatggatgaaccttgaaaacatcatgttaagtgaaataagccagtcacaaaaagacaaatactgtttgatttcacttatgtgaggcacctacagaagtcacattcatagagatagaaagtaaatgatgactgccagaggctgggggaggggaaaagaggagttactgttattggtatagtttcacctttgtaagatgaagagagttctggaggttggtcgcagaacaatctaaatgtactttactgaactgttcatttataaatggttatggtaaattttatgtgtgttttatcacaactaaaaaaaacctaaaagataaaagttaatgagctaataaacagaccaataaaccagaaacattaatcaattttgaagaggtaaatcataaacatactataatcagagaaacagaccctacccatgtagaagaatcaaaaaacatttacagagcaaatgcctgttaatatcatccaaactatgtaagtgctgaaaggagatgctgaatggagagaaattagcagttaagtgagtagccagattttgaaggagagaaagctacaggcatttcaggcagaggacataacataaacctaagtgaaaacacatagcagctctatgacagagagtccttggaagacagtaaggaagaaatgggttaaaaaattgtaggtgatcctgaatattaggcaaaaatatttgctatggcaagagacctaatgacgatgaccttggaaaagtaggacagtatagaatgatggagaaatcagagaagaggctttaagaataatgcaggcccaagataaaagggtgggagtgacgtgcacagacaaaacagtgggtacattaaaaactaaatgttgtcagcctgtggatccaggaatatgatggctctattaacattaaaagggtaatttgttatgttactaacatgtaaaatgttagtgttgacattttacattaaagagatatttctgggtacctaaataaacatgacctgcagaggacataagatatacagggaccaaagtttgcgagggcaggtatttcagtgaggtccacccacagaggctctcccatggactatggttttcacagagtttatttaagtagtgtatctaccatagtctctgaaacctctgcaagggaagttgaagaatctagtcattagaggatttcttcaggaaaagagatagaagagtagaagagatatattggtagtttactactcactctggatagttaattggttaaataactaggaaggtagcagaatcaaaggtttatttagtccatcagtaagttaatctagatttcagatttatcttaaaattagagtaaattaaactattcctacatgtccatgacattaaaatgtccaaagctacttatcttgttctagttttaatctggtatttttccagatgttttcagtatgatagaatgtatagaacatgattacacagtcattcaatttgacatactcagttggaggaggagcgaataataaaccttggtaacagcccttcattcatactcctctttttgtcttgcatttctgttaaacacacacacatacttaggactcattcagatttttaaccaccatatcacaacgctaattacggtctcttatttactagcaatagaagtctaatgttgtggcgttctcaaggattcaggaatgttattcaaaagcattttgagctccatttgcctttgatgtttgcctccagtttctgaaatttgcccagatgggggaaggggatagagggggtggtcttactatttcctgaagcacaaatgccgcagcagagcccttttagggacatcttgattctattagaatttgcaggtcaaagggcaggttcaactggcctggtagtttaaagcaccagggatagagtgaatagactactgtaatgacttaaagttggatttctgctgctacctactcattatgctaataatgtgcatgttggtcatgtgggcggggggattactaatactttgaaaggtttcgtgtccacattttccttttttttttttttttttttttaactctggaaaagaagggaacagaacaaggagagtaatttgacaggaaaagcattgcagttcttattttgccctgggcttgtggcatacatatattaccgttcacattttatgtgcttgtattactccctagggactcatgggaatgaagtcagaatgtgctacactagcaagcctcccctttctgtggatagtctttagttcgtaaagctcttaaagtcgatgattaattcctttgaggttcaatttctttaaaatatttatatcagtattagaataggtgatctcaaaccattgactcagattaaaagaagttataaaaaagaattacttctggtaatttttattttctttatacttttctgtatctttcagtttttcttcaatgactgtgtactacttttatcagaaaatactttttttcaaagaagcaattatattgagtagacagctattaaaataaaattttttcaatttgcttttttttccactgtgaattccattccctctgaaaagctgagtgtttttaacaacatttctgagtttagacactctcaagtgtgccatgtaaaacttaatcaggtaagtccgactataccatatggtcctttctaagagatggattagaggaacagcaattttcgtattccctaaaagtctttgctgttactgtctactagctttcacattcttccctatcctccaaatttttttcaagaggttgttctccctcatactatccacttcaaatttaccagaattgtaaccaagagaacaatactgtctttgtcccttttggaaaataaaagaaaaacctaaaagctagtatacctatcaaagatagacattactcagaattcatatgattatatgtgcaatatataatcaaaacattttattctcttgactatgaattgcccttcttaggcacctatacatgtagaaatcagtgtcaggagtatacgttgtaaatggaaagcagaaagacatgatgatctgttaggggatttttagaggatgagagccatggtcataggagagaaagtttgattctgtatagtccatagcatattatcattgcttagtaaaaaaaatagcatcaatgaaataaaatctctatttgaattgcataaaaaatacttcaaattatatatcttgttaaaaagacactattccaatggctcagactccaatgccacattcctcaaaactttgaaattagaaatctaagttgtcatctgttatttcatattgtgatttgcaaagttgacattttaccccagaggtgaactgtaccacactagctgtccaagcataccatttatgaaagagtttggaattcagtcaagaagcttcaacaatatggaattatttttactatgtcatattacaatattttccttaagcacaaaataggcctcaagtctgatcgcctttgtattttgcattcagcaaaggtgctggtatttcaatctaattaggtagagtaacttatctgtcattcacctgctgctgcttgcctgctactaaatatgtgattctgactattggtgcacagaaatgtagcacccttattgggaaagcatgctgcctcttccagcttggtcagtctttgagcttcccgaaagggaacagatgaccgcagtcaacaggaaactgcatagttagaccttcttgaactctttcacctttaagctcatttcaccacttaacatatttttttcaagtggtcagtggatatatttagactgtcattatccctttagtgttgactggatcctcgtggtataagttgcctgccatttcttagaattacgtagtgtggggacagtgcgatgagaatcttctctcctcttccagcagcaaaactagtgaaacaaatctttatttccatgatgtaaaccgagtacacatcttctatttgttagtattgctttcagagttgagtagacctacacatccagaataaaaaatatccattagaatattcagtagacagatagtcttccagtctgtggctaaactaaaactcttccatatgactgctgttgaagctcaattatcttaacaaaagacagaagcaaggttaaacttgggcaatgcattctcagattcagcatttcctcaggtcaaaagctcaggccacttatatagttcctataaatcaaatatgtcttctttcataaaagatgagctactgagaaatgcattttggattatgaaactaattgttcaccaactccattgtgattattttgtaaatttcttacatcagcttccccactaaatccacctttttttcctttggacacaaaccataaagtaattattagctaaaccacaaggaatctgtaaagtttaaattactgtttcaaagtgtgcagatcattgccagtaaagccacaactgcaaacttatttgcattcatgagatgaaaagaatgattgatgttcataatgcaccaggaatagatggctgtgtttctatatccacgttattaaagtctgcagtttgttgtacactgtatgcatgaaaatgtcttcagtgtcagtaatgcctcagatcatctggaagctacagaataattatcaaaggaataaattaaatggataaagtatgtaagttacaggattattcttaaagtaactgtttacttttcaaattcaactacaactataggaactctttttaaaatataaaatgaaatactaagttcttactaatatagttttttttaaaaggttaacaatttttatttattctttttgagatagggtctcactttgtcacccatgctggagtgcagtggcaccatctcagctcactgcaaccccacctcccaggctcaagagatcctcctaccttagtctcccgagtagtgagtagctgggaccagaagcgtgtgccaccgcacccagctaatttttgtatggttttgccatgttgcccaggctggtctcaaattcctggcctcaagtgatccacccacctcagcctcccaaagtgctgggattacaggcgcgagccaccacgcctggcctgaatattttttaaactttattttattgtagtaagaagacaacacgggatctaccctcttaatcacttaagtgtacaatgtagtatcattaattgtagagagaatgtcatacagcagatctctagaacttactcatcttacgtaacttaggctttatgcccactgatgggaactccccatttccccctctctcctctgccttgcaaccaccattctactctctgtttgcgtgagtttgactgttttagatccctcatgtaaatggaatcgtgcagtatttgtccttctgtgactggcttatttcacttagcctaatataggggaacttattaagataacaacatgataaagacaatttagagtcacattcgcctgaatgggattcctggctgtaccatttactccaggtgtgaacttgggcaagctgtgtaaactctgaaagtcttggttttattaccctcaaaatgggggtactgataatagtaacttcaaagaattgttggaaggggtgaatgatgctgttggcgtttgctttcttggttttattaccctcaaaatggcggtactgataatagtaacttcaaagaattgttggaaggggtgaatgatgctgttggcgtttgctttcttggttttattaccctcaaaatgggggtactgataatagtaacttcaaagaattgttggaaggggtgaatggcgctgttggcgtttgctttcttggttttattaccctcaaaatgggggtactggtaatagtaactccaaagaattgttggaaggggtgaatggcgctgttggcatttgctttcttttgcaggcaagaagctcttctggctgccattagtgaaaaagacgccaatatagctctcttggagctttcgtcctctaagaagaagacccaagaggaagtggctgccctgaagcgggagaaggatcgtctggtacagcagcttaagcagcaggtattattaaatgccagcaggagggtcagtggggccagctttcacaccattctccacacaggtctttgccagcttgtactttaaggtctcatgtttcatattagacatctgatcattggagctagttagtttccatcattagagactttttatctccgcaaatctgtgtctaggaaatgcagagcattcgtggtaagagggctgttttggacaatgtcacaggtcttctatgagaatgttttttaactttgtacaatggattgtagaaattattgaaattagcccatttgacatgaaaaggcttttttttttaaacatccagcaagatttctatgacagcagccactaaggatattttcatgaaaagatttccagttattcaggattgggtaagctctgaagataagaacaaaggttggcccttttcttttccagcctaaatgctctcaaaatttaatacttaatattcatgtaacaccttttgtttgtgaaaataaaagctaaaagtttcccctttgatgatggttgcacaacagtatgaatgtacctaatacacaaaaccatcaacttaaaaatcgttaaaatggtaacttttatgttagacatattttaccacaataaagaaatggagaaaaacatttcccttggaagataaggagagtgctggatgtttacatcggagccctgcttgaacggcagtgctcctcgttgagtgctcctggctgggcgcagcatccgcgtcccagcctccgtggctgtctcctgcattcccagtcacgttgtctgtacattttggctgcccaggtgtgctctttgccctcaagtaatgagaccgagaaagagcttttcaagtaaagaaatttattttcttctatttttggaggtcagtcatcaattgatggtattttggcataatgtttatattaacaagaatcaatatttaaacaacaaagttattttctctgtggatcaaattaaaactgcttagaaatagtctttatatgtatttatgttgcacactttgctgagaaaataccaaaagatgtcttttttctgcaggatggatagttgaccagcaaaaagtaacccattgcttattcacaagtgaaataaaacttttccagggtcctaaaatactttttagcaagaagaggacatcatctaatattttgactacctgttatgtaagataggaagaatgtgcttattatgaaagacatccgtccagtagttgaaaactgaaatttggctcatcaaagctgataatagcaaattggaggatattattggagaaaggagttcactgctgtgggagtttatatattcagcaatatcacttatcttaagtagttaggcttgaatacataggcctatgatttaagcagttcttgatctcttcacttaagacaccaaatagaattgaatatctagcagaccagaataccatacctcatttacagtggtttttgattagtggcctccaaagaacatatgttttcattatgtgaaaattaaggaaattggccgggcacggtggctcacgcctgtaatcccagcactttgggaggccaaggcgggtggatcatgaggtcaggaaatcgagaccatcctggccaacatggtgaaaccccgtctccactaaaaatacaaaaattagctggatgtggtggtgcacctctgtagtcccagatacttgggaggctgaggcaggagaatcacttgaatccaggaggtggagcttgcagtgagctgagatcacgccacagcactctagcctgacaagaggacgagagtccgtctcaaaagaaaaagaagaaaagaaagaaaagaaaaggaaattaattaatctctgagcttataaccttagaaggaagtagctaaacaattctcagtgtctttatatcaaaccacatgccttgaattttctgtagcgatgtgtcctgtatgaagagaaaaataataacagttctcaggagtccttcctacagtcatctcctgcctcccttttacattcctgccctttcaaagcgtatctggatgctgtgagcaagaaggaaggagtcttgccaaaggcatttgattctttaattcctccaagagtgtgtactaacttttggacaagggagaggccttttggaaagaggatatggcatcaatgttgttttaatttaaagcttctagtccatgaattgctggaatgtgcctcagtctaaaggctatttcctaacagggaagcagtcagcattgaccaggctttccagcaaatggagctgccactgcctgataggctcttggcgttcacatgtgattcctattgtcagaaagaggtgaagcaatgagggatatatagatttgggggtcaccttctaatatggtcccaatttacttaccccctctaaccaccgcccccccaccccctacagggtaacttgtctccttgactcattcatggcaaagcagcacttggagaggctgcatcagaggaaggggccagggccagtgaaaaaaataaactaaggctgtctaacaaactccagatgttctgtggtgggtgccagccagtgtgttcagaccttaagtcatgaagaagccccactgtgattgtcaggcccccgcacgagatttaatgtaaactccgatagaaccctggaaagcattaatacaatctgtttagtcacagcagttgtcacaagatggcctttctctcagcattgttttcttcttttcacctccagaattttacaacctccgtattgtgttggttgctggtgtgaaatctggctctgcccctgtgtgctctacacagatgtgttataggcaggctgggcttttcaggacaggctgggattttttttttttttttttttttctgtttttaagagtcaactataacagtataaaagtaaaggctacaaacttaaacagatttggtttgaatctagataatctcatttacaactacaattttgtaatcctgtgcattagaattaattgtcacaccatatattctttgattccagtgttttgtaggcgtgagggatacaaaagcacagtgctcgtcttaagggaactcacaggctaatgcatcaaaccctggttgttctagtcatctggcagacattctgtgtgttagtccgcttccacactgctgtaaagtactacctgagactgggtaatgtaaagacaagaggtttagctgactcacagatccacatggctggggaggcctcgggaaacttacaatcatggcggaaggtgaaggggaagcaaggcacatcttacatggtggcaggagagagagcgatcaagcgaggaactgccacacacttttcaaccatcagatcttgtgagaactcactatcttaacagcaaaggggaggtctgcccccatgatccaatcacctcccaccaggcccctcccctgacacatggggattacaattcgaggtgagatttgggtggggacgcagagccaaatcgtatcacgttctgtagaaggtaatcctggccttgccaactttttctgctgacagctttagcaggtcatccaaacattatgtaacttatttacccattcacttcagatttacctcacagagttggtgtgaaattcaataagatagcacacctgaagcgcttagagtccccccttccattccctgtcactgatagccctgttcgtggtcagaactgtgccataggtgacacacagtacattgagggaggggtagtctcagtaagcatggctcttgttccttttttttttttttttttttttgaggtggagttttgctctgttccccaggctggagtgcagtggtgcgatctcggctcactgcaacctccacctcctaggttgaagcaattctctgcctcagcctcccgagtagctgggattatgggtgcccgccaccgcgcccggctaattttttgtatttttagtagagacggggtttcaccagcttggccaggctgatcttgagctccagacctcgtgatccacctgtgtttgcctcccaaagtgctgggattacaggcgtgagccaccgtgcccggcctggctctacttcttggttgtctctagccactttatttaaatgtgcagactcacgcagtgttcagaattacacaaccagcacatggcgttccactcctctgaggaagaacgtatttctcagggcagttaggaaaaagaggtagaggtactttttatcctttcttttttccacctgttctttttaatgatatgactctcatatagaatttttaaaaaataattctaaattctaatatgtctttcttaaatcttacattttcgtcactgaagaacatttaaatgcccgtctggctgaagtcctcaacattaggaaaatgtcaactcccaagctacatcccatctcactcgccttcgagttctgtgattttccacatgttacctcccgttctgggtatccccgactagtataacttttcagaattctgtgaaaatagagcagtgacaataatggccaccacgtgccacttgactgtcgtgcgcagggcacaggggctttacatcaccgggtcttccccacagctctggagagtgtcttcattatttggggaagcgcttcagacccaaaaaggataaaactgtggctaaatttccatgaagaagactaagcggtggagctagaattagaactgattctcttctcactgtcaccatcttttgtgaagattccagatggttggtaatcagattgtattagaattagaataatacaaacaatgctattttatgtttttatgatactcatttgttccctgagacacagaaaaggggatctatttatacgccagcccttcccctctccatccgtaaagaaccagaaacaaaaaagaaacggtgcgatttgtttcccttttcactgttccaggctgagcatcacctttcggtacacgcggtctttctcccgtcatcccagcactacttccttgagatgagatgacatcaggtgatcccgttggtcttgagaatgatcccatattcttcagtcaagcattttcatacagtagttttctactgtgttatgtgtattttacttgcttaatcctccaaagaccgctttatttccctaatcactaagttcttgatgggaagagtatttcaccgttgccccaagtactttcagtaggtgtggtatgaaaaaatacctgaatcaagtgaataatattttgagtaactgtcttttattaacttccgtccactctctagtgaacagttttcagtctctcttgtggcactgcctatgatacctttgctcttgttgtttcatcggtaaagctgagtactttgacattcactgattaggttgggaaaaccagcctatgctttgaattggccgtttctgcaatctagcagacattctagcacacattcactcatctgtgaacctgcatttgtacatgctttcacacttccccatccctattagaatgccagttaccatgataacacgattcaatgctctgtccacatatcccactcagaaacaatttgtcctataatatggacttgctatctttcaattcatttatttagggttattttactcctttgttgttagcgaaaagaaaatgtatataggttaatgcctttcttattttgactttaaccttttttctcacatgatgtagagctggccattggcccacctttaaatggctgtatatcatctatcttttcctcctcgtggaaaaggctactgtctattatagaagcatggtgtactaattatgaagttgcggttgaaaagacactttatcatcactctagccacttggaactttccaaataaatcattatttggactaaaatttcccagtcttgtttatagtacaaaggtgaatacctttttgaaggttcagtaaactctctttgttaggaactgagggttatgacaacaataaaatatctgtttcagctttcagttttggtggacatgttctttgatcacagcttttatgagagaaaatgcagttttattattaattcttctctagccaaactcaaatcattttactggtttgaaatgtgtcgtctttacctatctcaaagttttgagtaaagaatataaatatattgttttgtatatgaaaaatgtgatttgttctcatttactaaaatttgggaagaactggcttaacattgatctgaagaatgtaggggtcagatacttttttaagaaaaggctcaaatttgattttcaaattcttagcccagggccctgaccgctccccgttggagcaatatttaggaccgccaagttggagacagtaaataattgattcttacatgtcagactgattgtcggctctctgcagtatacatgagttgtttttgaacgaagctaaaatcttgtgaagacgtactaataatctaatatgaacccagttagatgaaaatcaccttttgggacttattctgttctatgagaaaaaaattatacgaaaaattctcctaactagccaagaaaatagacctgtctgtagtctacttagtgatttaaagccttttccttagacatgaaatccatgatggaagcttgttgccaataagaataatggagaatcaacctttaaagccacatacatgatgtagaatttcaagttgccattattctgtattgtaatggtcagccagagagacatgtgtctagtcagttttattaactactttctacagcagtcctcccttccttttctctgtcctattttctgaaccaacagaggactaaattttcttacggagtcaggaagttaagacttaaaatttaaggaatatgagggtagagtgtaccttgttgacttacattattgcatctgaaccttcagatgacatcctgaaataaattgcatagttagggtattttatacctatgattcccattagggacttcatggttttgacaaatacactatcaaagggaagcacatcacaaagaacactacttgcaggtcaaatattgacgaatttagggaatatattgtgtgatattttggtctaatttttcactttcagtttgttgctgtaatacacatagggaatttttaaaatatatgtattttagatttatgctgtatttgtaaattcccataaatacataaaaggaccgtgctaagctgtctttggggtggccacactagtgtattttcctctcacgttttaccataagcagcaagaagaaaccaggcccccaccttcagcactttaactggaaatctacttagctagatctctgagttcattcagtacattctccactttctacacaactgtaggtgacattgttgctaaagttctggtactgcatatcaaggatcccagtaacaagttccttgcttcccttgaagatccagtggcagcctcctaaaagcccctatttcagtgaacagccaattcagggcacttgaggtttgcactagtctctcctcagaatctttccaggtcttccagtttccgcccactacccagctccaaagccacaccggcgtttgaagtttttgttacagtgttaccccattcccagttatgccaaaatctattagttatctactactgcataaaaattacccttaactgagtggcttaaagtagtaattattgtctcacacagtgactgagggtcaggaatttgcaggcagcttagcaggtggttctgacccggggtcctctgtagggttacttaggacacgagagccagcttctccagaagtgacccgagagaggaagagagcaaccaaaatggaatttgcagtgtcttccataactgaatctcagaagtgacataccatcacttctgccttattctgttcacacagaccaacccttatatagtataggaggggacagcacagtgatgcgaatacctggagacagagatccttgcaagccatcctgaaggctgactaccacagcaagtgcatgaataaacaaatttggtatgtccatgcagtgaaatgctgctcagcagtagacagaaatgaactacaaatacacacaacaggttggatgaatcgcaaagacacaccgagcaaaaatggagacacagaaaagtacatactgtatgattccaccatactatacagtgtaagaaagcagatcagacaacaaagcagaacttattcatcgtttcttcccctcgtcagctcacttgagaggcctgcagggggaaagggacaagttccattctctttcactcctctgccttcttcatcttctgatgctgcttctctggccaacattgtttcctttggggtggagcagcagccaaaagacgcaaacctgacagctttctgtaatatcacttgacccacagaaagcgcatgcatcctcgccgtgccaaacggtgagaaataggccgcctccgatacttctgtttccgtctgccatctgtctccttctcagataagcacaaggcaaatcaacaagtctgatggaatgagatgccagtctccttgacgtgtactcacactcagtctttaggagtggttctctttgagccctctctgtcttagctaaggcaaaggggactcttgtgaatgaacacgtaactctccatgtggcaagtccttccggcagtagcactacgctcacaacagtcttagacagatggatgaagggcacctgctgaggcagtggactgctgacagtagtgccttttcagccactggccactaagctgcctttatacatcttggttgcttagctcttttttgtcacctgctttgggccttggtcaccaattctataacaactggaaaagcccattcatcatactattaaaactgttttacattctaaaagaagataacaatggtaggataaaacagcagagagctcctgagttgttagtgaataaagggaaaattaaatagcaagtatcgcagcagcttaagtgctgcggaaactgtggaaagtaaaatgttgtaaacatctgttcatctcacttagtttaaatcctcgataatgaggccagcctcagagagcatttatgtacccatttgttttatatatgaatctgtcatctataatgccaggtgcctgttttatgactgagaagacattcctcaaaacacatctgtgttaggcactgccagggccccttcaccttgcccttgacggtgcctacttcatatctgctgtgcacatcagcatcagcctcccagctgtcctgcatgatgttatctccttgatggtgactgttgttttatcctagaaaatgaaaactttggttagaatattcagaatttgacagaagaatgcaattccgagaaaaacagaagattacagttcagtctataataattcaacggcccttatttttttatttactgatttatttttaataaagacagagactcactctggtgcccaggctggagtgcggtgtgcagtcatagctcctggcctcaagccatcctcccaccttgacctcccaaagtgctgagattacacacgtgagccaccacagccgtcctcaatggcctctattgactagttaagataaaaatgttaatcttttaaaaattattttacctcctttcaaccctaaatttgtgtatattaagtactcaaatatatatacttcttcctctgaaccattacaaacactaagatcaactagattgttcctactgatggtatccagattgttttgaaagaaactagatgcaaaccctttttcattcactgtcctcacttctggaattgccttgcacttcctcagctcaatctccactttaaacttctcttcaagactcatcatgataggtcggaatttcctagcctgaagtcactatttttccttatcgttagcaaagccattctgtgctttttttcattcacgtattcattttcccttggcttaagttgaacaaatgagaagaaaggagggagggagggagcagagagaaagagaaagaaacttttcacttggactagagttgttaattgtatttattctttatgttaagccaggttattcttgttggtgtgattatttgttcaaatctaagaattcccgttctataaccattcctgtcttgttttcctgtttgtatgtatagcgtggtacaatagaaatagtaactgagtgtcaggagacctgagctctagatccaactctgttgataaataagtatataatcttgaacgtaataacaccatcaacgaatatcaaacacttcacattttacaaagtactattcagatacttaatagcgcctaaccctagggctgtatgggcgaagcagatctcataaataaaaggagtgagtggtttaaagccacagcagaaaaagaactgtgagaaagtaggggccacatggtgttgtctacagaggcaggcacttctaactccagctctcgtgaccatgtcagatgcgagccctgtgttattcaggcatccatgtttccctggagaattcagatttttatacaaatctctttatgtctaagtgttggcagctaatgtgttttttatttttatataaatcagtccacaaggctgatttaattgtgtttgttttaacacaaataaggccacaggctgcctgacttgcctcttcgggctttatcttcctcacctataatattgggtggatagatcaaatgattttaaagtctaaaattcattattttctgtattttgataaatcaacatatttacctgtagctgtatcgtctgctaaaggctgacattaagagtttaaaaagaagcaaatcaaaaagcataagaaaacgtgtgtaaagattgtttaactctgtctatagaaatttgctttttttatgaaagtattattttattaaaaaatattgcattatgaagatgaaaaaatcttggtttttttgaatccttcaaagaaatagatcatattttgatgaattctgcttgattggagttactaataagtagaaagtccagaggctgggaatgtggggaaacctggactcatcccaggctcctttcatccatctgttgcatttttttgtcgtcatttccagatgtaggaaaatccctcacaacaatttgataagactcttcccttcatttccagcatcaaatctaacttgcctttcctatcgtcaaactgctgccttttatgatgccacagggaattaatttataaatcttctgtgtttcctgatccctcttgaattgtctcaacgcagataaatcaacctaggtttcctgcccatacgctggtgccctcctctccctgtttcttctgtgtccatcaggtggtgtgatttatagctgcctttcctatgctcattgaccttggtctgaggatctcattaagcatatgtaaaactagaaagattagtttgagggtcgttccctcctccgttaaacttctcttggtgggaaccagtcagaccaatatattccaaaaatctgttcctgctgcctcttttggtctcttttgaactaatgtagatactcattaaaagcaaatgtgaattagacaagtgtggtggcatgcgcctgtaatctcagctactcaggaggctgaggcaggagaatcacttgaacctgggaggcggaggttgcagtgaggcaagatcacaccactgcactccagcctgggtgacaaaacaagactctgtcacacacacacaaaaaaagcgaatgtggaattaaatgatatttgcattcaaggataataggagtggtgttaaactagaatattagctgtcactgagtgccgttttcagaagctgtaatttacatgaccaaatgtattatcacatgactttctggaaaacagtattcacgccattagtcatctcaagaaaatactgtttaacgtttaggcagctgagccctattttgagttctttatgtgaattaattcatttaatcatcactacagccctcagaagtggagttatcctcattttacagagagggaaagaggttaagtaacttgccctaagtcccgtagctcataagtggctgagccagggcaggattcagagccgatcatatcactccagagctgacactcctgatcactacaccaaaatgtgttaccatcattacagcatgtgcttttggtgagagatttcaatagccttcagccatattattaataaccccatcatactctgttgtaataaatagtactttaatctacccttataaattacagtgaaaatatatacattactgtaaaggactgcccccaattttaaaaaattaattcagaatcctgacaggtcaaactgctttctaaatcttgtattaaaaagatgtcttctaattttaacaattaccttataaatagttgactggattaatgaacagctgtacagcagaggagagggtaaaatgataagctgatttttaagcagctaagttcgaaaatctgtgtgctcataaccctaaattaccattggaaataattttgttattaaaatactattactgtcatgtatacatagacaagatgtatgcaaatctggttccaaagtattgcacagcatttattaagatagtgtttagccaccagcattttttttaattttaagaatcaattaatttgcatacttaacagctcatagagatgagtgattggaaagctgctgaaaagttcatagaaaatagtgactgttgaagaaagaacatctatcatacctgaagttcagtattttccccctatatttcaaaagttttatgaaatataagaatttaaataaataaattgttgagctttaatactaaaacagtatttgtggtagttggttttcagggtagagatgcttaaagtttatggtattgccagccttgttcctgaatggagcatttagaattggatatgatgtttttcttggtctcccagaaaattacaacctactaatggttaaatctaaaattatgggttctcagaaaataatttggaacatgtacagtctgggcctacctaacttttaacaagctgattcattagaaatatacaaagagattgaatggatattactgtgtttaaatctacatatgcactttacgagtacacccaaagtgcacacctggaaacaaacaccaaactgtctcctgagacccaggttataaaacacgcttagagaagcctggttggttctcagtcattggcctgaagccagtgaaaggacacagttgcatcatattcccctagtctacagtgtttaacatttcttaatttcaatttctgctaaatgaaagattcttataaatcaagttttcttttcctaacaagtttcctcgcaattaccttcctatcttttttttttctttttttgagacggagtctcgctctgtcgcccaggctggagtgcagtggtgtgatcacggctcactgcaagctccgcctcccgggttcacgccattctcctgcctcagcctcccgagtagctgggactacaggcgcccgccaccacgccctgctaattttcttgtatttttagtagagacgggggtttcaccgtgttagccaggatggtctcgatctcctgacctcgtgataacgcccgcctcagcctcccaaagtgctgggattccaggcgtgagccaccgcgcccggcccctatctatcttattattgagaaacaatagccaggaagaacagaaggaaacctgtttttaaggctggttctagttgagctaattgctatctagagctctctttgtatttagacatcaagacaacagtcacagcaatgttccctaagcccgcattgtcctcctgaatggtagatgaaattaccagcacctgacttgcagctcttcttatggctgtgcactgaagtaactatttctcttaatacatattttaacaatctcagatgagactaagtgggtctcttacttttgtgtcgtctagtaaggagccataactgaaatatcctcctttttattaccataatgatataactataggaaaagaaaaaacatgagccatgattgacagaaattactctccttgtcagagatcatttcctctgttgcttaaagcttcttgcaatgcagcccttttttttttttttttttttttttttgagacagagtcttgctctttcgaccaagctggagtgcagtggcacgagcttagctcactgcaacctccgcttcctgggttcaagcgattctcctgcctcagcctcccgagtagctgggactataggtgcctgccaccatgcccagctatttttgtatttttagtagagacagggtttcaccatattggccaggctggtctcgaactcctgacattgtgatctgcccacctcagcctcccaaagtgttgggattacaggcgcaaaccactgtgcccggtcacaaaaaaaattttaattgaaatgcatgcagccaggcatggtggcttatacctgtaatcccagcactttgggacgccaaggcaggcagatcacttgaggtcaagagtttgagaccagcctggccaacatggtgaaaccccgtctctactaaaaatacaaaaattagccagccatggtggtgcacacctgtaatcccagctactccagaggctgaggtgggaggatcgcttggatccaggaggcagaggttgcagtgagccaagattgcaccactgcactccatccagcctgggcaacagagcaagacttcgtctcaaaaaaaaaaaaaacattaaaaagtacacatgtctaagtatacatgtcagtgaaattttacacacttatgtaaccagcatctacatccaggaagcagatgattgccgacaccccagcaaccagttctcacactccgttttcaggtaccatcccctgcctattcctgcaggagtaactgctctactgaattctgacagtattgattaattgtatcttaaaaaatcaaaacttaaagattttctgtcaacagagcaaccagggacccagaggcagaagccaggggagccaccacaggcagagggcacagccttgagtcagaggattgttctcagaccttgaaacctaatggaattttctctgctggatttcagacttgcttggggctgatgagccctttttttcttccagtttttcccttttggaatgagaatgtctatcatatactggtcccaccgttgtattttggaacctgataacttgttttctgtttcgcatattgacagatggagaagatggatcatacttagtctccctcatacccaactcagattaattagatgaggagatttgggactttcaagtgatgctgtttagatggaattttggatttagagttgtgccatagtgggttaagatttttggggatactggaatggggtgaacctatgttgtgtatgggacagataagaatttggtgggactagaaggcaggctgtagtagatggaatgccccccaaaacatatgccctccccaaacttatagcccccaaaaaacattatgtccacgtccagtttctataacctgtaaatgaaaccatatttggataaagggtctttgcagatgggattaaattaaggatttcaagaagagatcattcttgattatccaggtggggccctaaccctaatgacaagtccttgtgagagacagagagaagacagatacagaagataaggtgatataaaggcagaggcagagattagactgggtggctatgaaccaagaaatgtccacagtcactgaagccaaaagaggcaaggaaggatgctcccttagcatctccacagggaacatggccctgccaacaccatacttttggacttggggccgctagaactgtgagagagtaaatttatgttgtgtttatgttgtttgtgatcatttcttacggcagctccaggaaactaacacatggagtaggtaacacagcttctcgagtccttcatgtatgacaagcttgttgcccctgaaggtattagggttcccctttatttgaaggagaaaggtgaatacattatctctgcttaatcactagcatttgttgatatatgcaaagaagacattcttaagacagcctcggggcagaagaggtcaaataatatttttggagaaaggagaatactaagagactaataagagttagcctcggccgggcgtggtggctcacgcttgtaatcccagcactttgggaggccgaggcgggcggatcaggaggtcagaagatcgagaccacggtgaaaccctgtctctgttaaaaatacaaaaaattagccaggcgtggtggtgggcacctgtagtcccagctactcggagaggctgaggcaggagaatggtgtgaacccgggaggcggagcttgcagtgaactgagattgcgccaccgcactccagcctgggtgacagagactctgtctcaaaaaaaaaaaaaaaaaaaaaaattagcctcatgaatgagctagaaaaggagctcttaggcagagggatcattgtggccagggttgctgaagcatgaagcatcctgagatcagggagccatagaaggcttcttattaccaagtctgcactactcctgggcagtgacgtgagactccagagccaggaggagacaggtcacggagagccctggattgacaatgctgagagtagcttggacttgctcctgtaggggatgccaagccatggagaggcttttagtctcaccgatgttttcagagttttcttttatagataaatcaatcactctggcagctaatggaggaagttaaggggagcctggagtaagaagatggtaagattaaaaacagggagactgtttaagaatctattccagttgcccaaatatgaaatgatgaggacaagaatatagggtagttgagatggagtaatgtattcactaggccattctgtgtatcaaacaccacctaatcttagtgccttaacacagtaaacgcttatttcttggttacacaaagtccaccgcagatcttgccggctctatgaggaagctgccctccatgcagcaattcagtaatccaattctactaaaaatttcctcctttagctctttcagtatgaggccttcttggtcactgtggcaaaggaacaagtaattggtggttcccgtgctgtttcttctatgcttgggtcccacggtcactacccacagaccactggccagtcagatgtctggtctggccaagtaagtggaagtggtctccctaattaaaatgagtaatcaagaagaaaggccatatatggaagagaatataacatgcttatttttagtagagttgaattcgaggttatttatacccaaatagatacatcaagaaagccgttggctggagatgctccaggtaaagatgagagctagaaatgataattttggagtcatcagaacagaaatactacttaaacccatgaaaatggaatagcttgcttaagagagaatataggcaagttatacttactttttactgttttctgacacatactaaaatattaacacaggccattcttttcatccttacagattatagttcaatgagcatatgccctctgtaagcctgttggtaatggatttcagaattggctctactggatatgcattgctaggagtttttatgcagttctagggtttttaagacctttttttcatgtcttacatgtgttgaaaatgctttaagcatttatggcacaatatatcacaggtgattgtgatcttatataccccatagccattttgctgatttgatatataaattaataaagctctgttcctggaaatgaggataatgctacatgaatactccaaagagttaacataaatgtagtcttgaaaagcactccctcaagaaaagaattctgtccaaatcctattaattcccgggtattttgcctattttccttaaaagcaccttacattaaaaaatctgttttgcattcagtctctaagcaaaaatatgtagtgcctttaaagaaacaacaacaaaaaaacccttgagtaggttaatctctccattttaagttacacacttatttcatgaactaatcaaacttgtcgttaaggcttcattaatttcctctccactcatggggtgggatggttgaatcatagcggggctgtgtgtgtctggaagtgacctttgtatatttgggtggtaaattatacttcaaaataccagtagacattttattaaaatttttattttctttggtagattatttccttctaattatagtagtaaacactggtatgttatgattagtgattagcttataacaaacatctaaacagggataagtcagcctgtttagcgataaacctgtctcttgatatatttagaactgatcactagccagtatggctccatatatttctaggacagtgtaacccacagtgacataaattaaaattttaaaaaaatcaaggatacagtaaataccaactgtctattaatattgattaataaatcaatacatttaaaaaataataaagtttaatttttcaaattgataaaagtaaaaattactaaattgatacattactgagttaataaaattaacatttactactattaatctaaatgggaaggtgaaacatgggacaaagaatgaatttttctgaacctaaaaactggaaggaaagtcaaaagtacttaccagagcatgcttaggatgcccaaaggtactgtcagttcatctcccggaggtggggttagtttagtcaccaccaaaataaaactgtggtcaaaccatgaattttggagtattaaatgaacccagttgtggattcactatggtcaaattactacaagaactgggactggaataggttgccctgccctagaagtttcctagttgattgagttgaggtctgattaagttgaggtcacttccagacacacacagtcgcactctgattcaaccatcccactccaggaatggagaggaaattaatgaagccttactgacaagtttgatgagggagggagcagctatgttggcatgtcttctaagagctgtttctgacttctggtgcccagcagtagtccagctatggtagctgatcagttgctgcctaattacctaatcctattggcaagatgaatgtttcagttcgctgctgtgcctttaatcataattgtcttttattcattcagtttgaggtcttcctggttcttgggatgttgagtgattctcagttgaaacctggacatgttggatgttatgcgatatgactctgggtcttacttagacttctgttttagctggttttctttgacaccactccagcaggggaagaatggggtgctgcctcagtattgcccagtggaggtagaagtccagtttctcccacttggaccctgctgacactcaaggggtggaggcttcttgttactcctaggtggagatgggtattcatgtccccactaggcttcactggtgtatccctgcctggttagggtaggaaggcctccactaacacagtgggggtgaaggaaggggggcctggttactgctgtgcggtagtgaaggtccgactccaccaggagacacggctgttactgctccatggaggtggaattctagaatcctcacctagtctctagtgacactgtggaggggagacttcattgctgatggttggagattatagccctgcctccctcggctttccctgacaccttccagtggagcaaggagaggctgaagcacctcctcacaacctggtgagcatggggcccgccgcttggtctttactgacatgagtgacagtgggaccacatggtctttggaatagagtgattgttgtcccacaggtttctatgttgctaggctgtccctttcctttggaggcttctttggctagagagagtgggctcctgttgaagcttttttggtctgtgcctgttggcatttcctggttgttggcttcttcagctctacctctggatatataaggcagaaagatccagggagctgcaggtcacagcactcctgactggtctgccttctctctgcctttttagtgtttgtctgtgtgtatagttcttgttgtacttttatacttagtgtgctggagaaaaaaaaatattcctgatacttcttaaagacagtaaggcagactattcaggggaccactgagatgaggatttgtgttagagggcagagattgggctcaactcagaatacacaaggaccaatggagatgtgtagcgaaggagcagggtgggggtcagtgatggaaaattactaagaagaaacgtcatggctgggggattcttgccagacctactcaacaggagttgctgaagacaagccagagagatgacatattgatagtgggagatgaggaatttgatcagatctcatgagtgatcaggcctcaagggtggggatttatttttgaaggaagacttaagcaaactaccttttctctttaggaaaataaaatgtatgttctgggcttagatatctaagtaatcagtaggttgaattttaatgcttacatgcagataaccgatttttttaagttataattttcattactacctcatcccttagcccaagtcacatatttacctgttttggaaaaccatacctctggcagcagttgagctttgatgtctagtatcattactttattcagcttccaattcattttaagtggtccttaatgggtattcatttcttatcagaatcaatctatacctgatacttgtatatttctggaaatcaaagtttttcaaatatttggatttataaaattataagtggaaatatttcaacaactatgaagagatagataatttaagatacttttctataattaacaactttttttagaaaagcctgattttaataaatggtggttttctgtttttttcttctacagaaaagactgaaagccatttagctcagttgtacaaaaaagaaactttagagaatagagaaaatcaagagtgcaatagtagctgtgggaaaattttaacaatgtaaccacgtatgtttgtacagatacatatatacagagaaatccttttataatgaatagtcagagtataggagaaaaaaatggtattggagagtttggccttatatcatttgctttcaatctgaatggttcagtaagaatctaaaaatgcctttatatcctctgggtttatttaaagatacttcactgtatgtacacacaggtgtatagttggtttatgttttgactcagttatattcttttcttaccatgtatggaccatgattttgtaaaaagaaaagataaaattccctcagaacatctagctttaagaactttggctgggtgtggtggcttacgcctgtaatcccaacactttgggaaactgaaaggcaagaggatcacttgagcccaggagttagtgacgagcctgagcaacgtggggaaacctcatctctacacaacaaaaattttaaaaattagctgggcgtggtggtgcacatctgtagtcccaggccttaggaagctgagatgggaagatcgcttgagcccaggtggtcaaggctgcagtgagctatgattgtgctactgcactccagcctgggcgacagaggagaccctgtctcaatttaaatatcaaaaagaacttttattcttgtgatctaaagttcttttttttttttcctttagagagaacacacgtgtgtgtgtgtgtgtgtgtgtgtgtgtgtgtgtgtgtgtgtaaagtgcttggattcttgaagatcactttctctgcttgcttagctgttcttcaagcaggagaaaatatgctgtatttatgtgattataaaaagcattgccaggcatggtggctcatgcctgtaatcccagcactttgggaggccggggcgggcagatcacgaggtcaggagattgagaccacggtgaaaccccgtctctactaaaacgacaaaaaaattagccaagtgtggtggcgggcgcctgtagtcccagctactccggaggctgaggcaggagaatggcgtgaacccgggaggcggaggttgcagtgagctgagatttcgccactgcactccagcctgggtgacagagtgagactccgtctcaaaaaaaaaaaaaaaaaacaaaaaaaaaaccacaaagcattaagcaatttaatttctgtatatttagtaaggaagtgatcatactttaaaaaaaaactttttaggccgggcacagtggctcacacctgtaatcccagcactttgggaggccaaggcgggcagatcacgaggtcaggagatcgagaccatcctggctaacacggtgaaaccccatctctactaaaaatacaaaaaattagccaggcgtggtggcgggctcctgtagtcccagctactggggaggctgaggcaggagaatggtgtgaacctgggaggcggagcttgcagtgagccgagattgcgccactgcactctagcctgggtgacagagcaagactcctctaaaaacaaaaaaagaaaaaagaaatttagtattacttcttgttttcgtggcctctgtatctgtaaaatacaactgtacactcagtgatatggtttggctttgtgtccccaaccaaatctcatgttgattgttattcacagtgttgaagaaggggcctgatgagaggtgattggatgggggcagcattcctccctgttgttctcatgatagtgagtgagttctcttgagatctgatggtttaaaagtgtgcgatacttcccccctcacctgtgctctcactctctcctgccaccatgtagaaaaggtgcttgcttccctttcaccttccgccatgattgtaagtttcctgaggccttccagtcatgtttcctgtgaagcctgagggactgagtcaattgaaccaattttcttcataaatttacccagtctcgggtagttctttacagcagtgtgagagcagactaatacactcagccactcagataacctaaattacagacaaactgtggtaaatgttcttggatcctggccattgttcactgatttttagaataacagaatgcacttgcctgcattttcttcttttctttagatatggtgttgagtctcactgaatccagctaataattccctttaaacattctgttctttgagaacagatacagctgggagaaatgatcctatgacattaaaactagaattggattgcattaggtttattgcaaggatgtgagatctgtactccaaagtggggcagtgaccaggagcaaaggctcaaccactctttgtttttgaacagtttcattttaggtactgcactgggccattataggcaaattggcccaaaaggtatttcactcctggaacttaagttcatgaccaacttttaggaatggctttttagatctgactgttactttttcaccagaatgtaccataattatataccatggccttgccagaaaacaggaaatctttcaaaaattaggagtggaatagaaattttgtagtttttttttttttttcagttttaaaatgttgaatgtgtttttatccttgtgttaatatatgtttgaagagagaaaatataggctgctcttctccagagttcgaagttaaagtctgcacagcatatgggaaagtgctaaatatacatggtaattggaattaaccattaagatgaacatactcattctggcagctaagaagggatatcttcagctcagggaaaactataagctatgtttgtaagtccacccagctgggttatgtgtctgggttatagaagccaggaatcccatgcaagcgtttctaaggattacaaaaacggtcatgatgagatggaagagaacagtttcttaagaacgagcagatagaccaaaaaaaattttttttatttgctttctaccaagagggggaaaaaagtagttttcatgggaaatatgttgaaagaacagatgtcttgtgagcttaattccataaatggtgatgtgcccaagaataccctgagataagaagaaaaactacatggagtcttaaaaaaaaaaatcactgagtcctaaagtaaataagtgaatatccataatcaacaattttccttttcatattaaatctatttgcgtggaaggaaatgaaggagaaaactttataaatatgtgtaaactggagtccctggattctagagttcttttgtgaaactagtgtaaggaacagaaattgtctttttatctgagaaaaaactgtgctagttgagatgtctattttctttgcttttgactgagataactcactgtggtaacactgggttttaaattctgattggtaactatatatctatttttgtttaatacaaagaggaaaatgaattatttaataaaggaatttttatagaaaaagcattcaaaatgttagactcattgccaaaaaatatatgtcgtccttaatcgtaggaaaggtgggagctacaaacctatcatttttttgcaccaatcatggaaaattgattcttgaattcaacaaacatataaaggattttatctaagctggcaattttactaggtactgagttgatagaaagatgaatgagactctgtcgcagccctcataaactcaaatctattggaagaaaagatatgtaaacagatgattagaatctgtttcagatagcgcggaaagccttttgttccaaacctcaagaagctgcataagcttttaccacctctaaaaatttgtcatgtgtggttgagctcatgtgagagaatggtgtcagaatcaaagagggggctgaaagataaagatgaggtgtgtgagcctatgcagcagctgcccaggggctagcagacgtagttatgactagaaggacttgggtttacaaaatgcctatacagagaatggaggtgaggcattgagctcacaagaggtggggagttggaaccgaacctctgctgaagatgggtccattagaggctcgctgtgcagaaaagcaagactcgttcagtcaaacgcctaccagtgacagatgacaaagaagcttttctctgccctgactctgggaaggagcccagagtcagctctaagaaaccaaagttatcaagcctgtaccttccccaggtttagactaaaaatttatgtcactacttgtctgggaagttcctacctgaagatcacaaagaaagaaatgtacatggtccttacccattcatagtaagataatggcaagctgaggtgctttgtgaccaaaatcgagaatttaacaacacactcaattaagcaggctgtgcacattgggaactctgatactctcctggtgggaatgcaaaatgtagacctcttatagaggcagtttggcaatatgtagtaacattgcttatctgtgcgttgactttgtgacccagaagctttacttctagaaattggtcccacagacacatcttcaaaaatacaaaataacatatacacaaggaaattcattgctataatatttataatagcaacagattcaaaataacccagttgtgccacagtgggatatttgttgtcaattatagtatatccatcagagtggaatactgtgcagctgtagaaagggatgagaaagatctctattgatatggagcgattcccagaacatactgttaaatgaaaaagcaagatgcagaataatgtatttaacatattactttttatgtaagaaaagggggaacatgtgcaattatatgagtatatgattgctaataattgcaagaagaaacaattgaaagacaaatcaaaaatttacccaaaaaagttacctctaaaaaggagggaacaggatagaggagacaggggtggaagcaagccttctgtgattatacctagttatatagttttgactctagaatcaaatgaatgtattacataatcaaaaataaaattagatctgaaaaaaggaaaaaagcagtccttgaaatttaaaaacaaacagaaacaaatgaatctaattatatattaaattgttgacattcacattgagcaaataattatttcagctaactttataatacagatttttctctgtacatctcagtaggataaactccaagtaaaagaacaaaaatgcgaagttttttttagtggtctcactctctcccaggctggagcgcaggggcacagtcaccactcactgcagcctcaacctcccaggctcaatcgatcctcccacctcagcctcccaagtagctgggactgcgggcacatgccaccgtgtctggctagtttttgtattttttgtagagatggggtttcaccatgttgcccaggctggtctcaaactcctgggctcaagtgatcctccctcctcagcctcccaaagtgctggaattgtagacgtgagccaccgtgcccagcccaaatagattttagagttcatcctgaaggcatattgatagtaattgtattggttttgaattttaaaagcattatattgttagagaaaacaaataacaagtaattatgttattgttaggaaccaaaatttttcagcataagagaaaaaaatataaagtataaaatcaaagtagtttagtaaacccagtcttcaagactgagatctgtaatcttaaatctgaatttaaaacattactgttaaccaataattttctcccttttaaaaaaatatttatttcctatctctgactgaaccagactagaagaaatgataaataataaacaccccacagccggattgtggtttcccacttagtctgtgtatggtatgctgctataacaaagtcggtaggtaggtagattataaagaacagaaatttattttttcacagttctggaactgggaagtctaagatcaaggcaccagcaggtttggttgtctggtaagggccgcttttgacttttaagatggtaccttgttgctgtatcctccagagggcagggacgctttgtccttgcacacatctattcatttactcatttgtttatgtaatgagttccctagtaaacttcagtgctgacaaatgagtttattttcttttctcctacttttttttttttttttttttttttttttttgttgaaacaaggtctcactctgtcaaccaggctggagagcaatggtgcgatcatgacccaaggcagccttgaccttctgggctcaagcaatcctcccacctcagcctccaaagtacctgggactacacacaggcatgtgacatcatgcccagcaatttttttttatttttttgtagatacagggtctggttatgttgcccaggctggtctcaaacttataggctcaagcagtcctcccacctcagcattccaaagtgctgggattacacgtgtgagccatcacgcctgccctctcttaatattttttaagagcaaaagcattatttacttacatggctgcacattggcttattttatatacctttattgagatatgattcacatcccatgcaatttacccgtttaaaatatgccattccatattgtttagtaaatcacagaaatgtgtaaccatcactacaataccctattttttaaagtatctttttctagtattatttcagtgtcatcgctttttatatattaaatacattttcacaaattgaaagcattattgattttgctgctcaaattgttaaatgtagccattgtccctttcccccaggcctggcaaccactgatctactttctctatatatagatttgcctattctggagatttcatataagtgaaataatatactatgttgccttttgcaggacttctttaacttggcatcatgttttcaaggttcattgatacttgtagcatgtatcagtacttcattcctttttatggctaatagctcattatatggatatgccagattttatgtatccattcataagttgttggatatttgggttgttcctcttttttgactataataaataatgatgccgtgaacatttgtgggtgcttttttgcatggaaacacgttttcagttatcttgagtatatacctaggattggaattgctaagtcatatggtaattgtatgtttgccattttaaggaactaccaaaatgttttgcaaagagaccttaccactctacaatcccaccagcaatatatgaccgtccctacacattctcaccaacacttgttattgacttttaatagccaccctggtggatgtgatgtggtatctcattatggggttttgtttgttttgttttatattgtattgcttctccgttgttcctgtagatcactgtggctttgatacgcatttccctattggtgttgcacatcttttcttgtgcttactgcctatttgtgaatcttctttgttgattgaaaagattcaaatcccttgctcatttttaattggggtatttgtatttttattattgagttgtaagagttctagacacaagtcctttatcatatatatgatttataaatatgttctcccatcctgtcgttctcttttcactttcttgttgatactgtttacagcataaaattttataaattttgatgtgctccgatttatttttttttcttttgccgctttcgctctttgggtatattatccaagaaatcactgcctaacccaggcctcaaagatttactcttatgttttgttctaagagttttatagttttagctcttccatttagctctttggcccattttgagtttattcttttatatgttctgagactgagacttaatgagtttgacatcattttctttgcatgtctatttctatttgtcccacaccatgggatgaaaagagtattctttctccattagattgtcttggtacccttactggaaatcagttgaccataaaaaaatgatgatttgtttctggactctcaattttgtttcattgatttctttgtccatctttatgctgataacacactgtaggtaaacctactatttactgtaggatctgaaatcagaaagtatgagtcttcctaactttattcttctcattcaatattgttttggctatttttgtatttttttttttttttttttttttttttttttttttttgtgacggagtcttgctctatcgcccaggctggagtgcagtggcgtgatctgggctcactgcaagctccacctcccgggttcacgccattctcctgcctcagcctcccgagtagctgggactacagacgcccaccgctgcgcccggctaattttttgtatttttagtagagacggggtttcacgtgttagccaggatggtctccatctcctgaccttgtgatccgcccgtctcagccttccaaagtgctgggattacaggcgtgagccaccgcgcccagccctatttttgtattttttaaaacaccatgtgaatttacagttctctcaaaaattgaagaagcagtaatagaagtagcactaatagtagcagtagtcatagtagtagaagaagaaatgctgtagcaaataaaggggagggaggataaaggaagcaggtagagcagtagaatcgtttctgaaggaggacatggatgtatgggttttttctgttctttcctctggtgtatgtttggaaattctccatataaaatataattattttagttttaaaaggagaacaggctctgaagctagactgtttgtattagagctctagccctgtgacttattcatcatatgaatgtcgctaagttatttaggctctctgtacctcaataaaattgacatgcaaattgtaccaacttcatattgttgctatgaggattaaattacctaaagctctcagaatacttggcacttagtaagtattcagtaaatgttggcttggaaattgactatttttgaagggagggcggtaaaaaaaaaaaaaaaaaagagtatttttaaaagtacacgtagatttaccaaataatcaataaatctagttattcaattaaaaacttagtggcaagttaacgtatatgaaaggagaattaatgaacttgaagattctgccgaaattatccaaaatgcagtgcagaaggataaaacaaaattgaaaatatcaaagagagattaggagacatggaaaacagactgagaaggtacattcatctgataggagttttgagaaagaccataggggaaattcagaaggaccaatattgcaaaataggaaagtatacatttaaaaaactggaaattacagattttgcaaattagaaaataaggaaattgcaaatattgtaaaaaagagaaattgcaaaatatttagaacagggaaaaacactttatatcaaaatttgtgagatgctgctaaagcagttcttggaggaaaatttatactcttaacacatatataaaattgaaaatgaaaaggctgggcacggtggctcacgccgtaatcccagcactttgggaggccaaggcaggtggatcacttgaggtcaggagttcaaaaccagcctggccaacatgatgaaaccccgtctctactaaaaatacaaaagttagctgggcatggtggcgggcatctgtaatctcagctactcaggaggctgagaaaggagaatcgcttgaacccggaggttgtagtgagccgagatcacaccactgcactccagcctgggtgacagagagagagactgtctcaaaaaaaagaaagagaaagaaaaaaagaaagaacagtaatgagctaagcatccaaatcaagaaatagaaaaagaatatctgtgtaacccccaacacacacacacacacacacacacacacacaaaagaacaaagaaaataaaaacaaattaaatgaaatagaaaacaagctgtaagagaagatcagtgaaactaaaagctagctcttagagaggatttaatgacttaattagatgtgaaatacatagtgagacagattgttcatgaagaaaagaccagatattataataattttaacagtgacttaatctgatgtcccttcagacttctattactaaagaattaattagtctgcttttattctggttaatagaacctgcaactgaactctcagattttttttatcaatactaaaacacaaatctaattagaatttaaactttttcttttaatagctgcgtttggataacctatcctgtctcttagcttatgtattcttctatgaaatgtagtttctgtaacaagttattttaacattttggacattgacatttttgtcgtagaagaaaaaattaacagaatagacaactaactcctttttcctctgggagggtatgtatacctggagatatacattgatagcaaagaagtctatttcagcaagtttcttccttcttcccttcttccttttttttcccccttccttccttcagacaacgttattctttatgtcgttgggaccaggggtttcatctccctgcacatgcacctggcacggttcaagaggaaaaacatttggatataaaatatctttcatgtcagtaaaacatgaaggaattactccttttgctttttggtcttatcttgagaagagcatactatgagagccccttaagagcacagagtcatttatatgatctgtgtaacatctaatgctctgtgagctgtcagatatttagtgctcaacatcataactatgcagggaacagacttcacaccaagtttcttcatactagacctaggaacactaaactttgatcatcttcgtgtctttttggaaatggagaagtaagttcttacaactgtttttttcattctctgacgtggatcaaataaggaatctttggtcttatctgtccacttggatcagtttttttcaggcaggcatacgtactcactcctaagaagtactttaaatgcgttctgccttgaaaatggatttgtgtgtactttattaggatttctttttaagtttttaaacttatgctagatatcagatattaaagattgtctcatgttctaagaaaataactagccaagtctactttcacccacattcctgttaaagtcaacatggaaaggtttcttaaccaattgaatgacatgatacagatgtttcgctcactttctgtatatgcctctttcctttcttctattttccttttttctgagagctgctttgcagaagactttgtcatgaaataccacatgccataagaaaaattagcctacatcttttcaagattgtcttagtccattcagactgctataacaaaataactcagactgagtaatttataaacaatagaaatttattgctcaccattttggagaccagaagtgcaagatcaaggcagcagcagattcggtgtctgatgagggcttgctctcggcttcgtagataatgctgcttcactgcatcttcacactgcagaagggcaaacgggctccctcgggcctttttccaagtataatggatacatttatttatttactcatccatttatttattcattcatttatttactcatccatttacttattcattcatttgcaataatcctttgaacaactactgtttgcaaaaaaaaaaaaaagtatgttatttgccaccagtttgataatggagataacagttctatatgaaaaaatcgatagttggtctcacaagcaaagtgtgctgggagagcaaaaacagaagaaaaacattattttcatattttctcttttgagtgagacactgtcctctttaggagttcagtttcctaccagtgatagaactagatatttacatctcccaaatcaaagtacaaactttggccatagaaccttgttcctcgttattttctttttattttcaacttttattttagattcgggggatgcatacacaggtttgttccctgggtatattgcatagtaccctcaggccttttttacagggatgctaatctcattcatgagggttccaccctctgacctaatcatctccaaaaggcccatttcataataccaccaaatcaaaggttaagtttcaacatctaaatgtggggagagccgggcgcagtggctcatgcctgtaatcccagcactttgggaggctgaggcaggctgatcacttggggtcaggagtttgagaccagccaggccagcatagcaaaaccctgtctctactaaaaatacaaaaaaaatagccagcgtggtggtgtgtgcctctaatccgagctacttgggagtctgaggcaagagaattgcttgagcccaggaggcaaaagttgcagcgagctgagatctcgccactgcattccagcctgggcaagagaacgagactccggctcaaaaaatataaataaataaataaataaataaataaataaatataaataaaataatataaaattggggggaacacaaacattcagaccatagcaaaggtctctgggggtcctcccagaaaagagaaatttgattcacagataatttattaatcggttttttttttttctatcgttatgtactggagggaggaattgactttaaaatgtgcttacattattaggtgaaaatgtaaagaacctaaatcttcaacagtatgggactcactaaatatccattcaggggaccaggcacagttgctcacgcctgtaatcccagcactttgggaggccaaagcaggcggattatatgaggtcaggagttcgagaccagcaaggccaacatagtgaaacccatctctgttaaaaatacaaaaaatagccgggcgtggtggcaggcgcctgtaatcccagctactcgggaggctgaggcaggagaatcacttgaacccaggaggcagaggttgcagtgagccaggatcacgccattgcactccagtctgggtgacagagcaagactccatctcaaaaaaattaaataaatggatatctattcagccaaatgctgtgtagccagttaaaagtagattttgggctggtcaccgtggctcacgcctgtaatcccaactctctgagaagccaagacggggggatcacttaaggccaggagtttaagaccagcctgggcaacatagtgagaccccatttctaaagtttctaaaaaaaatacataaactttctaaaaccaacaaataaatatatatacatatgtatatatacacacatatacacgtatacatatatgtgtaattttttaaaacagtattttagaatactatttaatgacatgaaaaaatggtcatgataatgatgatagctaaaatgtattgggtgtcagttttacgccagacacctttttaagtgctctccttgtgttaattcaacaggttaatcctcacagcagtcttatgtaggagaaaactgttgttatccccattttaaaggtgaggaaactgagactcaacagcatttacatagcttgcctgaagtcagctggtgagagacagagctagagtttaaactcaggcaatttggctcttttaaatcccttgctcagacatattacatatctctgtaaattttttttatgaaactagacaaactatttttaattcatctagaaactaaaatgtgttaaaaataacctgtcaaattttgacagagtagaattggtggacatattctaccaggtatgaaaatatgctataagatatagtaatttttaaaatatcctagtgtagctgaaatagagaaaaagtagaataaatcagaagagcatgccactttttatgttcacagggaggggactaaatggatacacctaaatattaagagtgacaatcactgatagaggaattatagatgatttttctttcttttctcttttttgtttgtactttattttttaaattatctataatgccaggagttcaagaccaccctagacaacatagtgagaccctgtctctacaaaagaaaattttttaattagctgggtgtggtggtgcctacctatagtcccagctactcaggaggctgagttgggaggatcacttgagcccaggagtctgaggttgcagtgagcagtgatgatgccactgtactgtacagcctgggtgacagaatgagactctctctaaaatataacaaagaaaacccaaattatctttagtgagtatttttaaatcatacagtattagcaagtttatttttaatgctttaaaacttcaagttttaacaatattttactagtgtaacatattgctgtttgattttatgcatcatgtaccctggcattttctaagctgcttactctgcagagttaatttttctaaaatgttcaatatattattcatttattcaaggcctaaattaaccactcacacagaatcactaatccagtcttcctttttgataaagatggagaaaagacaatgggattatagtccttttctggcttagggttgaggagaaggatttcagaacttttaacttatttttaagactcgaattgtttattgatggtataaagaaaagctatttatatatatatatatgagagagagagagcacttctgtctgaacacctcactgaactctgtagtaaattgtaatagttgttcaattgatttttttattgagaccctgtctctacaaagaaaattttaaaattaagcatggtggcgtgcacctgtagtcccagctgctcgggaaactgaggccagaggatggcttgaggccaggagcttgagacaagcctgggcaacatagtgagaccctgtctctttattttattttttatttttttaaaaagacagttcatgaagtgcttgatttggggatattgcctcttccccaaaaatttctgtatcaatttaattgccagtcttagcccaagctgccataataaaatgccattaactggatagcttaatcaaacagaaatttattttctcacagtttggagaaatcaaggtagtgtttgattcagttcctagtgaaggttcttcctggcttgcagaggctgcctaattactggatcctcatatgacagagatataaagagaaatccctctatttttctcttcttcttcttacgaagcccagtcctatcagattaaggccccacccttatgacttcatttaaccttaattacctcctgaagaccctgtctctgggtatggtaacgttggggtttaggggttctacatatgaatttgggggaggcacaattcagcccgtagtattggctaaactctttccagtatcctcagaaatcccatatttagtttattttattgcagacaggattagttttatcctttcttatggaactcttaaaatactcgttactttacagtgtgtcatagaaactttacttaaatttaaccttatgaataatttcttcctagacgcaaaatcgaatgaagctaatggccgacaactacgaggatgaccacttcaaatcctcccattccaatcaaacaaatcacaagccctccccagaccaggtaagatggctctggaatgttttattaaaaaacccacacacttaaattttgaaatgtttttgtactagcatgttgcaaattctgagatataagttagaagaataaaaataaatagctaattcagttctgaaaactctactcttttcaaaaaaatcacagattcagtttctttataggaagaactggatattttaagagcagatacttgaaagatttgaacaataaagaatgcttgaattgggttgagaaaaaaattaacctcagagatacacactaataatatgtaatttttaactgtctttactaatttttaactgtcttggttttctttttaaagaaatagtgccttattagaaaaacaagactctttccttacaagcctagtgaggcacagtttggaggttatttctgtttagttgcaaattatgaactctctgctcattacctattaaaagtgaagattgaaacttagttcttcactccctgtccttgtggatccctccagcatgtcatgcttaaggaaaattgttgccttcaacttctcatcaatgcaaaagagatattgatgaatctgaagggaaccatattccattctagtttcttggaagaagggaactctccccaaatcttgaaaatgatggatgggagagaatggtgaacagattacctcatatcccattaccaaaaatcaaattttaacatctctatcacacccagtcttaaaatatgtagctaagggaaaaaaaaaaccagtcaggtaatcacatccatatgactaaagcatcaaggaaaactttcctgctaaacgtctccactaaataacagctatggcgttatcttagcagaagcaggagaaatagtgcagatgaaagcagcaatggtattcaaattgctgttgcttccaagattcggaaggtatagtcctattatgatgacgtttcctaagccagttgaggcaagccttgtattttagaaggaaaacaatgtaaatatttaatgtgggcaaaatggagagctatctgcctggtgtcagcagtctttccctgccaagagatcattttaccttttctgcctgcttcctgatacctggaactgaatttatgccagggtatataagatgcatgtttgattcctcatgaaaacaggtttttgataatagaactggatgcctggagtaggaagagacaaacagagaaaggttgaaggaaaagcaaaacataaagaaaaacctccaacttggtaattttgcccagatccagccctgagatagagatagcatcttggaaagtaggaagaaaagaagtataatgacaaactacagttgttcctgagtatcctcaggggattggtttcaggacaaacccacccacaaatgccaaaatccatggttgctcaagtcccttatataaaatggcatagtatttgcatataagctacacacatcctcccatatactgtgttttgttttgttttgtttttgagatggagtcttgctgcgttgcccaggctggagtgcagtggcatgatctcagctcactgcaacctacacctcctgggttcaagtgattctcctgcctcacccttctgagtagctgggattacaggcacctgccaccatgcctggctaatgtttgtattttagttagagacagggtttcaccgtgttggccaggctggtctcaaactcctgacctcaggtgatctgcccgccttggcctcccgaagtgctaggattacaggtatgagccaccatacctggcccctcccatatactttaaatcatctctagattacttgtaacctaatacaatgtaaatactgtgtaaatagttgttatactgtatttttaaaattttattatcaatgcattgttattttttattgatttatatatatatatgtatgtatatgtatatatttcatccacggttggttgaatccacagatgtggaacctgcagatacagaggaccaacattaactactaattttgatagtttagggaattagaatctgtatgagagagtcaagaaattctcttctgctacattatgcttatgtctttgttttaaatactaaccacctctttttcattccatgctgccctggggcattgcccccttgtcatctctctccctgtaggatgaggaggagggtatatgggcatagccaatcagaggcttagttcagccattttgttcagaacggtgagaaacagctttccttaactatagaaatggtttttgtttgttttcatttttctttttacacagtaactctcacatctcatttctctgtaattcatgaaatccctggtgtgctttctgtttttttattttcacgtgattcttgtgtgtgttgctgtgctgctgacatagtggggtttggattttgtggcttttttttttttttctcgttgtgtgttaatagtcacttctgtaatttctttttatacatttttgggagaacttctaggacgtgtaactaaatttctccagttgtgattttattaattaccctttctagggtgattttacagtgtcctggcaaggtttatagtaattttatatgaaattggcaatagaaaattgatcaagtactttgctcattggcctaagtttgaggtatactttttatgatgattaattataaatacatggtgtttaaaaaaaaaactgtactgtgaactaaaacctccttttgtttgtttctgtagaagaatgagctctcacagtcagcacctcggacacatcccctggggctttggcattaccctcaaactatccctaaaaatattgaggagcaaagtaaaggaaaactttttttagaagtcattctaaaaattcttttccctcccttttcatggattgctgcagtgttcaacagttgccaggacactgtctagattctccttttcaggacaattggctggaaagtatagtccagccgtggcagtatctccctttgatctgatgcccttgaggtttgactaaggaaatccttttcttagaaaaagtaataattatgattaataagttcacacatatttggtggccttgcactccctggattcactgcccatgcctatcagtgatctcactcccctggagtcagttctccctgaaatgtctttgtcttggtgttaaacttcttaaaatgatgaggacatgtgtagatctcttaacgttgagcacaaccaagaaggatggagaggtaagttgtggaaaggggccatgcgctgtgaggtgggaagctgtccagatggctttatcctgagggcatgaatgaagttgaaacgcactgggtcaaccagaaagctcttcaggttaggatgctgcatgtcagagaaagctaaagctgagagcagtcaatgtgctaattatctgcactggacaagggtaggtatttgtcatcatcaagcatgtgagaccgtgcagtagctggatgtagtttactggtctcttagaaatgagcatgcccctaccttgtctattttggcagaacataggagcttcttagcttccttcagctggaagcaccacatatgtggacatgattatatttttgtcgcaaatcctttttctggccaatcagaggaagcctgttggtattctaggaaacaggcctataggtaacttcaccaggagactagaaagtaagcaaatcagtatataaacttgttcctgaaatcttcattttcctttctctaccaaaataggataacttagctttttccaattatcgcactattgagcatattgcactaatatattaactttcattggtttaacaccatgcaattgcaattagccagccataactggcgtttctatgatatggtgtttccaattttataaaatgtgctgtaaacctcattatatcataaggattttacctaaagaaatgcatgagtgacccctaaaacactgcagaagttttgactggctatccactttccttctcctgtttcctcactaattttacagaagatagattttctttagaaattcaaacttttgaaattgacgatttaccttatcaaacttaaaaacgtgtgttttgcatctgaaacattttctaggacaccaatacatactgatcaagtgtgagccttacttgatgtatccatagatgggaagagaatcacagatgtactgagctgaaaaggattctggagttaggccatttcaggagaggtggtaaaacgtaacgcttaagagtgtaggctttggagcgggatgcctatgttcagattctaccaccaccatgtactagcttctgatttggacaaggtacgtcattgcgctgtacttcaatttcttcatctttaggatggaggttgttgtggggagtagataagttgtgagacacgtggactccagagccagactgcacagctttgaatctagacctctccacctgccctgtgaccttgggaaagtcacttaaactccctgagccccagttcctttatccaaaaaatgggtttatgaataatgcctacttcctaggattattggatagattaataagttgatagctgtagaatgctttgagcagtactgtacatgcctttgttatgctgttgccgttgtcatcattaacttagatccgtctccaggaaatagtaagctttcaataaatgttagttcctgttgttactaacatcatcgtctaatccagtgccctcattttataggtcaggatgcaaaacaaagattgaaaagttgtgacttaaggtccccaggcatttctgtggtctggaaggaagaactagtatctgacagtaaaagaggtagtgaagacatattgatggtgatagctgtcttccatcaccacaagtttcatctcctatatgttgaggaattttttcctttgggaaaacaccttgaattttataaagaaattccctattgtatgacatttagtcagtgaaatctttgaaagaattagctgtcaagcagccctcctaagacacacggactgaagcaaggactgcctccactcataaaaaaaaataacagttccttcactctcctcttggcctatagaaaatccatgtgagggccagactcggtggctcaagcctgtaatcccagcactttgggaggccgaggcaggcagattggttgaagccaggagtttgagaccaggctggccagcatgacaaaaccccatctctactaaaaatacaaaaattagctgggtgtcatggcaggcacctgtagtcccagctactcaggaggctgaggcacaagaatcacttgaacctggggggcagaggttgcagtgaaccaagatcgcaccactgcactgcagcctgggtgaaagagcaagacagtctccaaaaaaaagaaaaggtaaaaaaaaagaaaaagaaattggttctctctctcacatgtcattctgctcaggcattcatgttaggtgttctaagttcaataactaagtagaatttgagcatgatttgataagttatgtaactattcagtaaatcacttgaataaatgtctatattgtaatgtgtttaaattgcactgggtccaatagccatgaagtcttatatgactatctcagtcagctcaggctgctattgaaaatatcatagactggatggcttaaaccagcagtccccaacctttctggcaccaggaaccggtttcgtggaagacagtttttccacaacgggggcttggggaagatggcttcacaatgaaactgttcttcctcacatcatcaggcatcagttagattctcatcaggagcgtgcaacctagatccctcccatgcccagttcgcagtagggtttgcgctcccgtgagaatctaatgccgccgctgatccaggaggcggagctcaggctgtaatgctcgcttgcccgccactcctctcctgctgtgctggacagttcccaacaggccacggacaggtgctggttcagggccctggggttggagacccctggcttaaaaaacaaacatttattttttactgttctaggggctgaaagtctgaggtcaggatcccagcgtggtcagatgtttggtgaggaccctcttcctactttgcagatggctggcttctcactgtgtcttcacagggctgagagagagaggaagcaagctgtctcgtggtgtttctttttataaaggcactaattctatcatgagggctccaccctcaggacctaataatcttcccaaagccatccagataccatcattttgcagattagggtttcaacatatgaattttgaggggacacaaacattcgattgatagcaatgacgttgctgactcatagatctcagtggtgcacatgtgacttagtctccgcccaacagggagttccagagcaaagatttcctatgtaagttagtttatccatgccactctctatccgtttactgtaagttttcttcttttttctttctcctttcttcccctcctccccacctccttttaccctccctcctcctcctccctccttactgtagaatgtaggccccatgaggacagggactttaatatatttacttatgtattcccatcatttaaataaatgcccaggatatagtaggtcctcagtaaatatatatgtgtgtgtgtgtctgtgtgtgtgtgtatttatttaactactgaattcacaaaaatccagaaaagtaaaagtaaagtttacattgaaaccaggagcatagaaattggttgttagctttattgtcagcactgctattactagaaagggaagataagaaagatgaatggaaacaaaagaattttagagaaatgttgagaatttaaaggaaaatcataatgaagtcctagagtctgcctcctgaaattttacactgaatataatggagttgaatgtaattctgaaatctttttcatttaccaactgaaaatccttcgggtagaaactttccttccagtaacctgtggttcttagccatcaagaagaacagcatatgctctttctggacttcaccccgtggagcagtttgtgtgaactggtgctaggtcccttcagtaaaggatggacctaccaaggggcttaaaagttggtcttggtataagaacatgccacttactacaatctggaaatggcctgcctattagatcagcactgtagcatctcaaaacaggatttggaccagtatgctagacttttctttttcattagagatgatgtaaatattaacacaaacttttaagacaagtgttgtaaaacaagcatctccttctcttttggcatttcctttttgtccatcttagtggagttgtcagtgtacttatcagttggaaacatcctaaaattattctcattgcaacagtgcaacaatggaagccttaaatttctagagaatacatccatagaagggaggtgttaaattatcttgcagaattaaatggtgcagtgaattgcactgctttcttggtatggagaaaatggtccaaaaaccaatttgggccaatatcaggactgacttttgatatgacagacaaggaagaattcgatcctctattttcagaagtggatcagagattttagcaagaaacttctttcctggaaagcttagaacaaagccaatggaattaaagaagcacaaggatctagctgctgagaaataggagggagaaaatgaacatttattaagcatttactataggtccagcactttcatgtatcttatctcatacagggctcatagacgttaaataattttccaagattacacagctaacaagcggcagatatttaaacccaggacagactccagaccccctgctgtctccattacaccatacccaaagaggagtcttccattttccagtctagttccttggacatagtagacaactccatggaagggtgttgaattgaattgaattcctaactggggaaataacaaaatggtctttgctggtaaggaatatctgtaggttacccaagacagaccctcactgaaaagaaactaagtggtttctgagttcactgataaatgtgactaaccaggaatctagtgaggaatttggaactatagaagggagaaaaaggaggtcttggaggttgagtaaagtttgggaagatgaaacaggaaaagaaaagttttcagataggaactaacttcaaggaggttccaacctaagaatgagaatatgatgtgtaggggctggtgaggaaaccagcccaagtgaaacagagggtgtctgtccttccattggttccatggctatccccacccacacttctgttttaatattggacacccataattcaaagagacaaactacagatgtgaggagctcacaagaacagttacatattaagctttacagagaattaaagtagtaatcagctgcctttggacgttgtctgaatcactgtcttctaagttgattgtccctttatctagttctgttgctttcaggtcctagtcagaaggtgggctttggaaccagattacttggtttcaaactcctgtgtacctcactttcttcatttgtaaaatcaggataataatacacctgcctcagagggctgtttgatgattaaatgaagtaacataaagcccttaaaacagaacaatgcttttacatatcagtagttgctcagttaatgttagctattagctggctttaacctgaaggcacaagctgaccacttatagcattaatacccttcctgcttttatcgttcccctcccttcttcactttctctgtcttcctcttggctctcatttaatgggagtattgaataagagttccttactcttcaactctggattcaaactattcttgcacaacctgaactccagtttaatagtgtttcctctatatgctcagaaatgtctttagtttactgtttgacctcggcacaccacctgttttctgcttttcaggtttctcttcttccctcctctccacaaagaaatttaaaatcttcatttctgcttttcactgttttccagagggttcactccctttacacctcatccttctgtcctggattctcactagctgtctcagaactctgccgtctgctattaaaagccaagctttctgccagccctttttgcataccatactcagcaggtcccttctgtgtgcctctatcttctctaagtcaccatctcatctcatgagcatgtactgaaacacataaacagttttgctactgctgctgctttttttttttttccttctcccaagcaacttgaacctatgtcaaatcaaaaaagattttggaggccgagcgcggtggctcatacctgtaatcccagcactttgggagacccaggcgggcagatcaccctaaggtcaggagtttgagagcagcgtggccaacatggcaaaatcctgtctctactaaaaatataaaaattagctgggtgtggtggcgcgtgcctgtaatcccagctactcggaaggctgaggcaggagaatcactttaacgcaggagacaaaggttgcagtgagccaagattgtgccattgtacttcagcctgggcaacagagcaagactccatctcaaaaaaaaaaaaaaaaaagattttggaaaagagttatttttgacaaaggcattgggaaataaagagtaaatgatggatgatgctagtagttaccatttaaagaatacctactaagtgccaaacactaagttgtaagtttataatcacattgtaagcatgttttcattgaaaccaatataacaatcctaagagatagataccattttcattattttactgctgaggaaactgaaccatggagaagttagctaacttatccaagttcacatacctggtacacagtagaagccagatttgaagccagatatgtctaattatatcaaaacttgacctacctctgaaggatacatagctagaaggattttttaaagacgttattatgcctttgtgttcatgctgattacaagagagaagagagtaaatgatggaattcaggacatgctaccccaaaatatggcacgttggcattggatacaacaacagaagcaggaaggtctctctgaccttctcctcacccttcttgcctgaagcaagctataaagaattttctgacctgcctctaaagtaagtcataaaaccttcattgcagaggtacccaccccatagctgaaggaaaagaatgtccttatctctgaagacagaggaacacaaagaacaacaggccttgttaattcctcccagtttattactgttattagattagacccaattgtcctcaaatcaatttctccatgactgtctcctcttcatcatacacagatttccttcttttctgaagtcttcattttctttctttctttctttctttctctttctttctttctttctttctttctttctttctttctttctttctttctttctctctctctctctctctctttcttttctttctttctttctttctttctttctttctttctttctttctttctttctttctttttggagacaggatctctctctctgtcgctcagactggagtgtagtggcatgatcatagcttaccgtagcctcggactcatgggctcaagggatcctcttgcctcagacacctgagtagcagggactacacgcgtgtaccaccatgccctgctaaattttgtattttttggtagaagcagggtctcactgtgttgcccaggctggtctcaaactcctgggttcaagcaatcctcccacctacgcctcccaaagttctgtgattacaggcctgagccacagagaccggctgaggtcttcgtttctgaaggctcccacattacataaaacttacagtaaataaatgtgtatgtttttctcttgctagtctctgttatagggttctcccccattaacctagcagtggatgaaaaaagaaaatctcttctcccctaagaatattcccataagaatatccaattataaataagactaacaataaactccttttaaaatctgagtagaaaaggaccccatggtagcaatgtatgtatgttggactaatttgtaactattctcctaagtgttgaccttaatctttctggtaatgcattttaggattagtatactacaaatgtactttttctccaaaattatacgtcctggatacatttctttatgtagatatgacatacctttcttgcttcaaatatcaataacatgtagtgtaagaagcctccaagagtgtggtctttttaaagctggaactcacatcctttattctatctagtaagccatctctcaggtctcattcttgagaagaaaaaaaaaagctgacaaaatttctacatttaaatttatttttcccttaatgtttcatatcaaaatggaagccatgtttttcatcatttcattcaagacataaaaccttgtgaaaaaccaaagtaatggaggaaatgaggaattgtcgtttagtggatatagagttttagttttgcaagatgaaaaagttctggagaatggttgcacaacagtgtgaaagtatttagcactcctaaactgtgcacttcaaatggttaagatggtgaattttatgttatgtgtattttgctacaattttaaaactttcctaattaaaaaagaagtaatggtgattttctggcaaaaaaaaaaaaaaaagatacattcaaaacatgcactgaatattattttgaaaatttttcttagtgaaaagaggcaccttcctctttcccaggtaaacatttcaaggttttgaaatggaaaagaactacccttgaggctttggtttagccttttgttctctgcttgggaaccgggcttatttgtttgtttatttaactggttgctttattagcataataaagcatgacactgttcttccttgatttgaactgcttagaagtctttaaaagaatcatttgcataatttattatttttaaatgtgttcacattcagcatttcctttaacaaagatacacacctataccttttacaaagactgaatatttaggcaacttaacagctacaaacttaactttttaatgaattgaagcacttttcattcaatagagatacaaatttggagaccatcttttagaaattggatccagaaaaatactctgaaccagggactgacttaaataatttcccaacatcaattaaatgagatttttcctttaaaaaaaaagttgttttgctttgtgaggttaaacttttttttattttatttatttatttgtttatttattttgagacggagtctcgctctgtcacccaggctgtagtgcagtggcacaatctcggctcgctacaagctctgcctcccgagttcacactgttctcctgccttagcctcccgagtagctgggactacaggcacctgccaccacgcctggctgatgttttgtatttttagtagagatggggcttcaccatgttagccaggatggtcttgatctcttgacctcatgatccacccacctcggccccccaaagtgctgggattacaggcatgagccaccatgcctggccgaggttaaacttttaagcaaaaccctacaggagagttatctggaactctttacaaaatgagtgtatttctttgtgagaagaacagtgtgtggagtgcaagggtgtgcatttattggtttacttccccaagcccagtatttttgtttgtttgtttggttttggtttggggggggggggggttaattataaagcattctattattgtatttaaatcttttcctttattattatttttaaattgacatctaataattttatgtttatagggtacagtgatattttgataaatgtgtataatgtataatactcaaatcagtaattagcatatctgtcacctcagacatcatttctttgtgttgggaacatttaatattcactcttctagctattgaaaaatacataacaaattgttgttaattatagtcaccttatagtgctatggaacattagaacttgttcctcccatctacctgtgcttttactcgctcagcggattcttctcacccactgcacagaaaagccaatacactgagacagcagcattgcagtagagaaagggtttaattatctcaaggcagctgatcagaggacgagagatatttctcaaatcttcctccccaagaactcagaggctagggtcttccaggataatttagcaggctgagggctaaggaacgggtactgctgattggttggggttgcgatcatagaggtgtcaaaagctatcttcatacactaaatcagtttctaggtgggggtcacaagaccggttgagtcagttccttggtatgagtaacaggtccgagtggagtcagttggttgccagaatgcaaaagtctgaaaaatatcttaaagaccaatcttaggttttacaacagtgatgttatctataggagtaattggggaagttacaaattttgtaacctccagctacatgactcttgatgagtaagcaattttagaaaagtaagctagggaacgggctgcgcacagtggctcacgcctgtaatcccaacactttgggaggctgaggcaggtggatcatgaggtcaggagatcgagaccatcctggccaacatggtgaaaccccatctctactaaaaatacaaaaaaaaaaaaaaattagctgggtatggtggtgcgtgcctgtagtcccagctacttgggaagctgaggcaggagaattgcttgaaccagggaggcagaggttgtagtaagccgagatcatgccattgcactccagcctggcaaaataagctagggaacaatggctggttatcatttaactacacctacatcttagcagaattcagtcttttcccataatcctaaccttgtggcctttcatttgtcttacagagatggtttcagtcccccgtgggggtcagcttgcagagggactattatcatttttgcttcaaagttaaactataagctaaattcctcccatagttagcttggcctatgcccaggaatgagcaggggagtgagcttgtgacgttagaagcaagatggagtcaggttagatttttctcacttttataattcttgcaaaagcaattttatattcattaacccacccctggctttccccttccccctacccttcctggcctctagtaatcactattctactctctgtttgtatgagatcaaccttttaagcttccatacatgaatgagaaagtatggtatttatctctctgtgcctgactttttcacttaacatattgtcctcccagctcatctgtgttgctaaaatgacagaatttcattctttttttttttaatcactaaatagcattgcattgtatagatatttgccacatttatccattcgtctgttgatggatacttaggttagttccatatcttggcagttgtaaatagtgctgcactaaacatgggagtacagtgatctctttgattactgatttcctttcctttggatatatacctagtggtatcatagctggattgtatgatagttctattttagtttgctgaaaaccctccatgctgttttctgtaatggctgttctaatttacattgccacaaacactgtgtaagagttcccttttctccacatcctctccagcatttgttattttttgttttttggggtttttaaataatagcgattttgattggtgtgtgatggtatctcatggtttgcatttgcatgcaaatgattagtgatgctcagcattttttcatgtacctatttcaaactcagcgtaattttggttgggaggccgttaggctaaggcagctccaatgccctgagttcctacataaacaaactgaaacccaactctttgtaaacagtcatattctaggccaatcagaaaccaccaactaaccccctacctaggggctttccaatactcaagtttaaccgatcaggaactgcctggccaacctctaaccagggactttccactggaatgatccaaaaaacattactgccccactttaaccaataagagattttctttaccttgcttctgctttcaccttacaaaagtcttctaccagtctcttcatcagaaccccccaccacttatggcctaaggctgcctgattaacgaattgttgtctgctcaaataaactctttaaaattttaacgtgcctttgtttatcttttaacagctgtttaatctcactgtgatcacaaaccatacattgtattgtcttaattattttacatttttgagactgttgttttatggcccaaaacatgatccatcttagtgaacataacttgtgctcttaaaggaatggtattctttaattgtcacatacagtgttctgtaagtatcaactgggtcaggtggttgatagagtctgtcagatcctccctgtcttcactgaatttttgtagagggagaggtctgttaattgcagagaaagaagcattcaaatctccaacaaaaatcggagatttttctgcttgtcctttgaattatttcaggttttacattgtattttgaagctctggctgtgtttgcagactcatttatgattgttatatactcctgataaactggccttcttaccactgtgaaacatcccttttgattttcagaaatatcatttgtcttgaaatctactttatctgtcttaaatcagcaaggggcactacaaagtaacagtaaaggtagatgtaaatattgttaaacaagtaataggtattcaatgaatacttgttgaatattgaattttagtattttctgggtggcagattgccagataatatggtttcgtgtgtgtatgtacgtgtgtgtgtgtgtgtatgtttcttttttaataatctattttctaagtctcagtgtggatgagatgctgtggataaaatagtactcacttcaggaagttagttacctccaaggttgactgagcgttggtcctagccttctaataactaatattgaaggaagaagcagctcataatgacataatgaatgagtaggcaatctaccttaaatctttagagaaaaaactaatgattgaacatacaatgtcaggtgttttcaatagaggggtaatagaagaattagagcaggtcaggaaggacagcttcataaatacgacaccttatgacctttggctacagttttactgctttcctgatatttgcttgaaccaaagctcattctctgtataccaacacaagtacaattctattctgttctttagctgtttaaaacaaagtggtttcttcatatcacgatttaaaaagagtagtctcttatgtctctaaaagaaccattgggaaaaaagcaaaaaagagtagtttttcttaattctaaagatcctcaaggcagtggtgtcttaaccaggaagacaggagagacccaggcagccttaggaagctcactgtcatcctcccttttcctcttgtttcttcatccctagaagtaaacaaactaaaaatggttttgacctttgaaaaagaaataaacactgaagtaattgcctgtgattctctctacccagccgtctgctgaaagtgtgtcttgagaagagcttgagatgatagatagatagatagatagatagatagatagatagatagatagatagatgatagatagatagatagatcgatagatagatagatagatagatagatagatagatagatagatagataatctgtctctactccacaggtcgataatagctcactaacgcatagccagggagatgtcagagtggcttgagacctcaagaagctttttcttaaatccttaaaacctaagaacctttttttttcttttcttattgttcagttgcctgttaattttttgtggggagtaggggttggaatagcatgctactgcttagagtagaacagggttagaattctttgctgccaggagtattatttcctttaaatttgtgtttctgttgtgtaaacaaaactatctgcttcctggaacataaagcacatacataattttagtaggcacttatgctggattgtgcttggtagttggcagtgagagcactttttagtgtgatggcatagccacatctcttgtggggacaggaatattttcctgttagagtggatggtgacctcttctgcattctgctttcttccccttccccacagacttgtagaagctcttgacaaacagagcagagaaacaaacttaagtaccagcattctcaccagcccaaattcctgaatctctgactgtcctaagacatgccagttgtctgtacctgtgcagcctttcctcatagcaaggactggaacagaggaggaactggttacagtaatcatcattcccctgtgaacaaaggtctcacgcagtcatttctcctcagtgtgttttcggcttcacagaatgactgtgagacaatgttgatctgtttacgtcacttagagctttcagcacatccttttaatggccaaacttactttttttctgacagacttagtattaggatcaactatcatttttctggccctaatgcacagagctattaaattcctcaaggttcagatatgtctgtttttctgcgtaacatgaattatccaagaaaaatgtagacacctacttaaagtaatagaaaaagcattgaatcagggtcagagacttcaaagtaatccattaacctcttggtacctcagtttattcatctctgaaatggaagtgatgataactatcctacttttcttgaggcaccgatgtaatgaatgtgaaagtagtttgtaaatccataatttgccatacaattaatagctgttgtttactaacctgtaggtagccaccatgtacttctatatagcttttgcatagtatctgaagtctaacacagggagtttttagattttttttttttttttttgagatggagcttcgctcttattgcccaggctggagtgcaatggtgcgatctctgctcactgcaacctccacctcctgggttcaagtgattctcctgcctcagcctcccaggtagctgggattacaagtgcgtgcaccaccacacccgtctagttttgtattcttagtagagacaggttttcaccgtgttggccaggctggtctcgaactcctgacctcaggtgatccacccgcctcaacctcccaaaatgctggcattacaggtatgagccactttgcccggcctttagaacattctttacaagtaagttagaggaatgtcaataggagcagggtgtagtcgtttactaatattggaagataccagatttctggatttttagggttagtctcttttgttaaacattaatattctctagaactcaattacttttgaataacttgcagaaattcccagaattctaggatctttgctctagactatacagcttttgccaaatttagactacaactatattgtacgttttgtggactacagtagttcgtctagtgtggtatagtaatgcatactattgcagatttgaaagctctgtcaacattatcatatcactggaatgctgcttttatttcttaattctaccccaggttgtcttaccattctgtctttgtacctctaaattcaatgtgtcgttctttttttcttcataatttagagtggtttgtgactgggccacattccatcttccacctttttcgtaaaaaccattttttctccatagaagtatcaaaacctttggaattccttcaaaacagctgtgtctgccctccttctagtggcccactagaacatatatgtctggagagctgcagtgcctgggacactacaggcagatatatatactttattcttaactagaatttctctgataactggacaccagcctagaagtgtctcagacctgctttcatctgctctttgtgttcttaaatcccagacagacccttccagaaccagatgaccatcaagacaaaagcatactcaagcagacaagaaaggagtaggtctcaccatatctcctagatttataatgtgtgctctctacctggcagacactacacatactgtgtaaagcactgctgggggccttctttgtgtgaaacctgggtgcctcgatgcctatcagaacttttacatgaggaagttggattggaggagagatttatagtcaacagtaaccacttaacttggaaaacagaaaagaaaaagaatcgtccataatcccatcaccccgatgcaatctcagtgaatatcacagatcagcattactgtttctcttatgtgctgttgtcataattgtgatacatgacagtagtgcaactataaatttcgtattttcttttttttaatatattgcatcccacctgtaaaactggcaagatatattttcttttgcttcccctacagggcgtttgtattattttgagggccttttaacttggtgataaagagtgtctttgccctaagacctaatttgaatccagcgtggtggtcgtgtaactgcccacaagtcacgtcacttcttctctaagcatcaggtccctcatttgttaaatggcaatcataaaacctatgccaaaggttaaggtgggaattaaatgtaataatgtagtcagtgcactcagccctttgcctgacatataggacgtgctcaataaatggcagtgagggtgacattgaggcagagacctcttaggctacatgagtgcattgtaagtaatttggggtagaaccttttacttaatgtattttaagacatcatttatagtgtttcacaggtagatcctgcttttctgtggtttctgttgagtgatttaaggtggcatttgtcctgggactcacttgatttatttattagactgaaaattatatagcatttgaagcatctctggaacatatgcactcagatccgtgggttcatatcttaatgattatgggcattttactaatgaggaagagctatcttcccctatttgtggtattatttgtgatttagacattcttcctggacaacaaagtatctttgtactttgtacaaaataaaactcttcacgtattacttgtttcccacacagtcatctgaaaatgtgggcacccgacagggctcaacaaatatttatttaaataaaacgtggatgagttttaccctaaagaaaagttgcatgtatgttatttacagttttctgcagtgtagtagctatttttaatcttttggtttctccctgcaccctaataggttatcctataattgggttccgttcatgtgtattagtgtcccaggctgatcttagctccagtaaatacctagtgtgccttctagaatgttatatcatgaagttcgttactcacccccctcagttagcctacgacttgacctttttttaataccagttttggaagacaggcctaacacttgtgtattccatcacatcttgatttcatagagttacgttgtggaggatatggttcaactcacattttatctgaaatattaaacagcagaccctttacgataggaccccgcagtactgctttcattcacttgtcctcagctccgcgctgatttgttcttcaggattactatctgttttgggttaactgttttgcagttcttagacacagaactgcattatcaaccaaaataaaagagctattctccctgatgtgccttccttcttcttcctgatcctaggatgatgaggctaaagtttccagctggatctggctcggcatttctgggataaattaaatgagcacacttgattgaggggtagctgcactgtatccctggcttcctattatgctaggagatcaaagcagagcacaaatagaggcttgctctatacaatattcaaaacagatggcttttttttggtgaaaattcaggttttaaggcaaaacacttgttagcaaaacttcatttcttttcattgatagatagtcactactgaacacatagcactgtttcttcctgtatttcaagactaggatcacaaactttttgcaggaggagggatttggcaagcctagaaaggtattagattgtctgtgtcttcatgtgaatatgaaataagttattaagattttgctgttggtattctagaatcaaatgaaaacatcttacatttggtcacataatcattttgttgttgggtcactatttaaaaatctagtactcatattgttttgtcttctaagaattgaaccaggatgtttatctctgatttcatgttttaactgaaaagtacattctccacactcctttatcatttacatctgaatcctcaagttcatgtagaataattctatgtgatgtgaaacttttattattttggtttaaaactgaaatgagaaataagattaattcaaaaatatttttgggacgtctgccatgtgcctaacactgcattaggtacgtggtaaaaaatacatgtttcaagacattgaaacaactgctaaatgatggattttctccaacagagaaaaattatacaagatgcaatagaaaaacccaggtctccagagagatttaggggttcacaaagaaggtgacacttgagctaactcttgaaggagcagtaggcatttgccaggcagatacaattttagataaggacatttgcaaagatatagaagcataagcagcataacaaatttagtatattcttggcagctcattatacatagtagttcgggtgtatgtcaattatctgttgcagcattacacattaccccaaagtgtggcagcataaaacaacaataaatgattttcatctcagtggtttctatgtgccaggaattcagcagcgtcttagctgggcagttcttacttggggtctctcatgggaccgcaattatctaaaaccttccctggggatagaacagccaattccaggattgctcacccacagtttgtgccacctattggaaggaaccttccgttccttgccatatggaacctctccattgggctcctggatgtggtgacatggagtccagcttcacccaaaatgagtgatccaagagatgagagccagaaggaagccacaatgccttttatgacctagaatcataagttacacaacatcccttcggccacattctgttccttagaagtgagtcactaagaccatcccacactgagtggggtattagggcttaggcaccactttttgaaaggaggaatgctaaataattttcaggctttttttttttttggcagcagagtctcgctctgttgcccaggctggagtgcagtggcttgatctcggctctctgcaacctctgcctcccgggttcaagcgattctcctgcctcagcctcccgagtatctgggattacaggcatgcaccaccacacttggctaatttttttgtatttttagtagagacagggtttcaccatgttggccaggctagtctcaaactcctgacctcaagagattcacctgccttggcctcccaaagtgctggaattacaggcatgagccactgcacccagcctcaggtttattttttcaattactatgggatgtcagagagggaaaaacaagccattaggtggttgcagtcagcagcaggtggatcgtgaagacctcagcatgccattgcaatctgtagaggttggacaggtggagagggaggtatacggggcagagtactggaaacaggacagccagttcagagcttgctactttgtcctggagagtgatgctgaggggctgaaggggtgcagtgatagaagagtttataagtgagaatatgtttattatcaagaagctctggttcttataggaaatgtcccaaatggtttctagtctctcttggttgagaaaatagagaacaccgtctgaatgcccagttataattcagaaagttaacttgcccgtaggaactactcagggaaaagcaatgaaataaagcctgaaagttctataaccgctccggggagaaccacgagctgtgatgcgctgatgccgactgagaacttagctgctggtcatctttacagatcaagtcacccctcaggattttgaatttttcattcagaaagttaggcaggggacaggggcagatatctctaaaattccttccatcttttgtattctgtactcaaaatgagtacaggatgctgttttgaaccaattagtgttttagacttgtctaaccttgaaaacattggacccaatagaaacatttaacctattcacagatatttaattcaggttgtatcagtatcaaggaatttttaactgagcgttttctggagctgaaactaagttaacttagtatcttgatcaatttatacatgtagttgaaaatgttcagatttttaaattatcttatggaatcattttaattagtatcactttttcatatttaaattgcataacgattttatttatcagtttttacatagattttactaattatcacttcctgtaactgtcagttttcattttatgcctattgccaaatccaattttccatttagccaatgttttattttgtgttaatattattcttgatacaagtacttttcattgtgaatggattttttaagatagtaattattattcctttttacaataatctgttggaaaattataagaatttcctctttaatattatatttaccctgttatctgagattggtctgttatggaaattggcaaacattttttaatggtccagatagtaaatagtgtatagttacacttttggtttttgtttgtttttgagacagggagtgcagtggtgcaatcgcagttccctgcagcctcaacctccttcccaggctcaagcagtcctcttacctcagcctcctgagtaactgggactattggcatgcaccaccttaccctgctgactttttaaactttttgtagagttgagtctctgtgttttgcccaggttggtctcgaactcctgagctcaagcagtcctcccacctcgacctcccaaagtgctgggatagcatatacttaggctttgcaaactgtgtacttcctgccaaaacaatccacctctgctgttgtagtgtgaaagcagccataggcaatatgtgaatgaatgactgtggctatgaactaacaaactttagacactgaaatctcatgttcatataaaaccatttttagctgatgggctgtacgaagaaggcggagctgaatttggttcatggactgtagtgctgtgttgcttatctggttcttgttgtgcttcttgtcattttacatgccttcactagccatccacaggccttggtgaggccaagcatgtggtggcattaaaatgtcctcagggtgaggatgtcaggtagttaccaaggataacttgtctttacatgtaccgtgatcttcacaaggatgggcataattattcccagtttacagatgacaaaacaggttattggaaataatagtagttaataattattgaagaacttaactatgtggcaggcacatagattatcacaaacccattaatacactgttaccaaagcaacttgttccaggtctcctacctagaatgtaacagaccctggaatcaagccgtacagtgtgtctccagagcccatgctcttcaccactgtatcactctgtgtgtaattctgctctgtggcacagaactatcaatacagtgcaaagatgtcatagcacataagtgatacacatctgtctctagtgagcgtagcctctgggttaaaaaacaaaaaccaaaaaaaacttttttcaccacagtctctgaaactgaatacccagtcattaacgtgatgtcaccagccaaccgcctgcatcctcctggctgtgcggtgtttgaatggccatagccacgggagctacattgcctgccctggtactaaaggatggactactgtgtctgcatccagtgtagtactgtaaggtgctgtgatgccacagcagccgttgccaaagaaatgtttaggtagatgcaattcttagttaagattataagatgcagaggatcgcctaaattaatttaattccaggctaattaaaaaatttcctgagggaagtaactgacgtgagagcagataagggcaagcatgcaggcacacagcatgctttcctggaaggtataagttgtaattgctccaagagatggcagaggtaggagtcctagttcagaggagcctggctccagccaatcagacatttcatagctctatgcacgtgtatgttttaagtagcgtgttaacctgatgctttcttctggtgtacagaaatatatgatcattgagacagaatgcgctaatgaagtcggggagctgaaaaccttcacatacatagaatgtagagcactgaactcacaggttgtcggaggcacacacacctgccttagaatggctttgcagtattccttgaaatgctgcatctgggaaatgatgtgtggatggtttgctagctggaggctggtttgttaattagaagtgtatctgaccaatggcatgagatcttattgcttaaacgaacaagatggcggagactttactccctttgaatggtccagcaaaggctatttcctgtcagcagtagcatctcatgcaagaagattacagttgctgaagcccacaaggcaactgagtatggagaattcctcaaaattgtatgttgtgtatatttgggcagactggttaaagcatgaagagagctattgctactgttaaagtatgtgtctgtgctatcaaaagtatactccctgaggctgaggctgcaatgcagtgagctgtgatcacaccactgcactccagcctaggcgacagagtgagaccctgtctcaaaaaaaaaaaaaaaaaaaaaaggtgtactccctggtaggagaaccagggaaaagcagctacaaacaagagcagattaacatggtgcagaaaaggcatgttctgcttcctcttgtcccttttctttgcttgatttctagagttagattttatcatttcactctttaatctgtttcttattttctaaacacccgtaatatattagattctctgattatatcaaaaacgtggtctccatcctctggatttcctcactaaaactggacgtggcttcctttgtgcagtagcttttttgtgagtactaaaaggtggcactggtatgagagcctgggagattaaaaaatagatatatgaagattctatataagcttaactttttcctttctcttttttactatcagtcactttacagctaaactaggagcctacttactctttattgactcgtgtagttacctgtgcttcagtctagatgtgtacaccatgtaccccttggaacttccttctgtggccgcttgctggcgctctgctgttcccccatgagtatcagtccgttctgtcaaatgctagggtttgttctttgcgctcattccatttcccacttcccagtggggctgcccccctttgccactacccttcagaattgatctccagtccctgcttaatgatcctgtgttcggagcagagggaaacagagcacgtgggtccttcttccagagatgggtgttacatacacccaaagggtcgtctgactggagatccttaggctagtcatggtccaggttgtgtaatcttgaaacatcagccaccatttgtagtatctctggtgtttaccatgctgagcctctttcgtcatagtcaattgtatattttcaaataataaagctttgcttaagcgtccacaactatgaatattgaagtggtgatgaccgtcagagtttgtgttgtgctacacggcttaacgtttcgagagagagagaataattcaatcactgcatgggaggttttattctcaaataaaggaagttggtagagaaagccgtcttcctcatgtttgtttttcccaaatctttttttccacccaaagtctggattactcccaaggtgagagggttgatgtctggaaattgttaatccatgggatctattcatggtatataaaattttcagaaagaatttgccttttaaatatgatttcctgattgactatagcaaacataaatccaggaagtacaactctgtcagagcagccaggatccttcttagcttctcagatgtatgagattttttagtgcgtgtgtggagtggaagtaaagattcttcccgtgggcaggtcagaaggagagaggggagttaggagaagaaaggaagagaataataggacatagaaacaaaccaaagctgctagggtcggggaggcaggtatatacccctggctttcctggaattagctgctgtccccctgaaaaaccagctttattttagtttatagtactgagaggaagaagctagggaggcacccttttagtgccttctgtcctggtactgttttcattcttgaagtgctcttttatgatatacagaaacatttcctcatcctcttggtgatacaaagttcttgggccactattttcagagaaaactaagctgtactaagctggaaatattggctgagggccattttgctcagatctctcctcccatctggacttcgtgcccccgtgcattcttaaacaccaaatcacaaccatttctcacctgctgaagtgagaaacagttttctggctgtttccgatgttagcattaaagatcagatttctgtatgtgacttgcctttctccaatggaaaggtgcccatttctgatatttacacacagctacagatatatttatagtttctcttggatttcgggtaatagctaactcttcttccctgccacctgtaccctctcaggccatgttcttattaagcactctaatgagaagctacgtctaccacaggctctagacacatgatgagaccctcagtggctatagcctagctgtgagcactcagcagtagacttatatctgcatagtctgttgtgtttggtttgacgctagagttcaaataataaggtgactaactgcaaactgcctctgcctgctcccccagcccttccatgtacagacagacggacacacacacacacacacacacacacgtgcacgcacgccctcttatcctgaccttgaaatagctaccactcacagaagagtctcctccagagactggcctgtctttgggagcctttgtacagataaactatcaaatctcatagtgactagacagtcatacttggctcttttttgtagtcctatggactgagaaggagccggtaaatgtgttcctcttcagttcaggtcacatctttgacatgttcacatctttattatgttgttccttgtttgttgagatgctatcaaggtcaggaggtcccttttgttgaccctgggtaactccgcttgcctttcccctccactcccaatgccataggtgagaaaggagaagataaaatgtgattatgaggttattatactcttttgccccctaggcaacaagcgtattgttgtttttcagatccatccgtctagcagacatgtgataatgccaaaaggtggtgtcgtgcttgactgcagcagttacagcacgtgaggcaccaggcctcagagggtcagaagagagtgtgagttatcaatttcaatgtttatgtgttcacacgggcatgcagggagttaaaagccaccatttttccctgtgaccaactgcccgcctagcttttcctttgaaatccagcgtcagtccttgtagggctggcctgctcaaaaagtatgactgtctcttctccctcttttgcctcatgtttcttccacatgcctagatttttgcccctaatgtctcattcataaatctgtagccctggaactgtactgtacagtagggaagccattcagatatatatatatatatgtacttatacttaactcttccatttttcactaaaacacaatgagtgatttgtgtggggagccaagcctcaagccaagaactgaattcaaagtgttttctcgtctttgttaactcttaacagcaagaaagaattttggaacacatttctgctcctggaatttctgagtgcagcagtaagtggctttctgagtggctttcttgacttcttgattctggttatctcatcgactttcagcagccatcctttcagggcgcatactgtatgtacccttgattggctggcctgtaataatagcttctgtgcctcctagtagcattctcttcacttttcaccccatttctatgtgctgtcctcatctgtatatacatgttcacccacctggtggtgaatgacctggttttaatgtatcttacaaatttccgagtactaaagcaagtatagagatgcctacagtcttgacatccttttgtagcacatggagagacacatagatatgctcagccagagatgtccttcccttactagtaggcaagcccctaacagtctgttccctatgcactcccttagatttcgtttgagtagcattttttataatgcataaggtaaaagagatgttaactgaatgaagattgaataggcagaatgcagttagcagctctgtagttgagatttcaagatttattttattctgaacgctgttccatatctccttacagctttgaggacataatgttttctcttcatacctgaatccagaaataaaggatgttttgttttgttttgtttgctagagtggtaatgcatccttaaagaaaaattggcaacagatttgtgagctgtaaaactaagaagaaatgatcatttgttattttcaaaaatgattctcatgtttctttgcatttcaaaacctatagtcttttgtggttttcataggcacatttacactttgacagaccataaaaccctttcaatctgaaacctttggagagagtttctacttttagaaccagatatttctattagtagtgagatttctgattaacgtttattcatctcagtgactagtggtccctggacctgaactcctagtggtaactgaattatatgattttgtgaactccattctttcacaaaatagctgtgtttaaataagaacataacacattgctccaaacctttgtgacaaggcttgacacactatccttcattttcctgaccctgaagtacattattgactaagaagatatcttagttattgagggtaaagactttgaggcagaattaatgaattttattttctcgcatcttttacttttcagagtttagctctccgctggggcctctggataagaatgccattctaagatgataatatttatggaaagttaatctgttattctgggattttcttaatgtagtctatgttgagagacagcagtacaatgacagtccaataagaaatcaaaactaccactaacatttatgcagttaatatatggacagttgaacctgcctctgaagacttcagcaggtaaaaagaacaaaaagattttgtagccacttcagggctctgagctagccacagaagaatcgtagtagatataaaaataatttgccaggaagacaataagtcatcaataaatgttagctttaaaaaaatggcatctttcgggctgggtgcagtggctcaggcctgttatcctagcactttgggaagctgagacaggaggatcacatgagcccaggagttaaagaccagcctaggcaatattgtgagaccctttctctacaataaatttaaaaaattagccgggtatggtggtgcatgcctatagtcccagctactttgggggctaaggtaggagaatcgctgagcccaggtggctgaggcttcagtgagctgtgattgcatcactgcactccagtctgggtgacaaagcgagaccttgtctcaatttaaaaaaaaatatatatatatatataaaaaatgacatctttcaacggacaaaagattagtaccccatgagaaaataccttaagccccaaataatattcagtacctgttcatctaggctttatgaggaggctgtgttatgcctctcggaatggttcttagagtaactatctggcacagaggcagtagagtgggaagagaagagcctactggacagacgcttcactctgcacatttcttccaggtattgaagtcacatggcccaagaaagtgtgtttggatctcatagatgagtgagttgcagaagtggaatgctgtagaatcttctgttactatttgtattgaatgatacaggaacaacttacctgtcttcctaaagaccatcagttatccaacctcactgaagtggaaactaggttaaaacaaacacctttggaagattactggtcttgtcactatgccatgaaatgctggcctctgaagcctgtttgagaatctaatacataaacaaataaattcttacaagaagaaacaaagctcttagtacttaaccaaaaatgtctcatccctttttataatttaaatttcctcaacaattttgtaaatgtagcattggggccataatgacgttttggcatcatatttggtacaagcaaatatcatgacgagttcattttttaacttcttttttcctagtgcagaaaagtatatttaagtacagttcattatagctgtacaaccaatttggcctgaccacatatctgatgatttttagtaggaccccttgccaatgtattgaggtcgcatgtggaaaaaagttataacttacgggtcctgtaaggcattctctttctacttggcaaatgtccctcttccctcttgagattaggcagtggcagttctaccttgtgggaaacacagtttcttttctaagtggactgctcaaattagatagggagaaaagggaagagataagggcatttcccacatgattgacatggttcatgtgttccgagaggcttaagtagtttttttacagatagatttggggactatactagttgggcagtttcatatgctttcacaatgatacatattttgggagtatttgtggtattttgatacctctatacaatgtaaatgatcaaatcagagtaatccatcacttcaaacatttatcttttctttgtaaaatgagtttttatcccggataaacaatttagaatttcattcttttttaagttttctttctttctctttttttttttttttttttccttgagacagagtcttgctctgtcgcccaggctggagtgcagtggtgccatctcggctcactgcaagctccgcctcctgggttcacgccattctcctgcctcagcctcccgagtagctgggactacagacgcccgccaccacgcccggctaattttttttgtatttttagtagagacggggtttcaccgtgttagccaggatggtctcgatctcctgacctcgtgatctgccctccttggcctcccaaagtgctgcgattacaggtgtgagccaccgcgcccggccttttttttttttttttaatagagacagagtcttgctatgttgctcaggctggtctcaaactcctggccttaagcaatccccctgcctcagccttttgtgtgtgtgtgtgtgtgtgtgtgtgtgtgtgtgtgtgtgtgtgtgtgtgtgtgtgtgtgtgtgtgtgatggagtctcactctgtcgcccaggctggagtgcagtggtgtgatctcagctcactgcaacctccacctcccaggttcaagcaattcttaatgcctcagcctactgagtagctgagactacaggtgcgcaccacacccagctacttttcatatttttagtagagacaaggtttcactgtgttggccagactgctctcgaactcctgtccccaagtgatccacccaccttgccctcccaaagtgctggaattacaggcatgagccaccacacctgacctcagccttattttttaagttttcgattggactctgaaatttttcagaataccagatgccatcatgtttatttaatcaattagccatcagcataaaatgcatttaaatctgtttgaaaattttttttttttttgagacagatcttgctgcaatgcccagcctggagtgcaatggtgcgatctcggctcactgcaacctccccttttcaggttcaagcaattctcctgccccagcctcccaagtagctgggattacaggcatgcgccaccatgcctggctgatttttgtatttttttagtagagatggggtttcaccgtattggccaggctggtctcgaactcctgaccttaagtgatctacccgcctcagcctcccaaagtgctgggattacaggcatgagccaccgtgcccggctgaaattgattgtttattaagaataaggatctaaaaagtcagcatccgcagtcatagtggttgtaggagtgagctaataatatctttttaaattctgttttactataaggaatttgaccttctcaatatgaccatttatcacattgccccctttcttcgtggtcatacttttttctgccagttttgtcagtcaaaagtaattacctaagataagcagctctttcagcctttgcagcccagatgtggcatttgtgatggcagctctatacccacaaacatgcgcgtgtgcaccaaaagaatgggaataaattgcacaaatccagtgaaaatcccaaaggtgatttttttaaatcaatgtattcatgaaagaagatagagaaaaccaagcttttaaaaaatgaggaatgaaatagggatatgttacttggcatcatgggggtgtagtaacagaaccgtgatgagacggtttcgtcattggcgcacagagtgtgcttgcatttaaagtaattttacctttgaagactgcacctggaatcctttgtaaattttccacaatgagtatactttttgttgttgttgttgttttgagacagagtctcactctgtcgccctggctggagtgcagtggtgtgatctctgctcactgcagcctccgcttcccgggttcaagcgattctccggcctcagcctcccacatagctgggattacaggcgcacgccaccatgcccgactaatttttgtatttttagtagagacagggtttcaccatgttggccaggctgctctcaaaatcctgacctcacgtcatctgcccaccttggcctcccaaagtgctgagtttacaggcatgatccaccatgcccgaccacaagtatacatgtatgcccagaaataaaatacaatatttttgaaaagttggtattgtttgcaaaaaactatccagctcccccactctaaattctctacttgattgaaacactgtcttccttctgtgactggctgtgttgacatgcctgtcataggtaggaaattccagcccagaactggtaccgtaaacctgctgattaggagtctcttacagagcccagcagccttccacagcagaactttggtgtttatcgtttatccttagagagagagagagaattttaaaaacaaaagtaatgctaaattgattaattttctctggtttgtctagccaggctccagcttctgtgtaatatactgtataggcctaaactgaactctgatctttttagcaagctgaagattgttttagccactaagcccttgctctttattctcttttaattatttcctggaaatagtattagaaacaaaggaaatgtgctatatgtattatgcagccatgaaaaacatagtttcggtcatatataatgtagtgaacagtactgacaatataatgttaaatagataatgtatcaagcaaaatgtgaggtgtgatactgttagaagctgatttatataaatttattaaaagacttggcaggaaaatttccaaaatgttacaaatgattacttcttttttatttttttttatttttttgagacagtctcgctctatcgctcaggctggagtgcagtggtgtgatctcggctcactgcaagctccacctcccgggttcacaccattctcctgcctctgcctcccgagtagctgggactacaggcacccgcccagttaattttttgtatttttagtggaaacggggtttcaccatgttagccaggatggtctcgatctcctgatctcatgatctgccctcctcagcctcccaaagtgctggtattacaggcgtgagccaccacacccggccaaataattacttcttgatggaagtgtatgcaaaagtcttatttcctttatatttttcttttttcccccaattttttggagtaaaatatatattgttttcataataaaaacataaaactttatttcttaaaaaaactcttgttgaaaaagaaataaaggaacgtggcaggagcagtcctctgagggggtccaaggaggaatcagtgttactgtggaaagtaataccaggccttgcttctgttgacttgaagattattgagctcccaattcattagttaggccagaggtgtcctgttcatgaaaattgccaggccggtgacatgcaacaggtgcagacctgctgtgtgagccctgggaacacactgagatctgccagcgttttggcggtgcttcgcagtgctcacagctgctgtgtgtcaagcaggggctgctctaatgcttcagtgttctgtgatggtgaggtctggccccactctcttcctcagcactccaggctttgaccagctaccaaatacctggccagactattgtcacgagagctgccaaatgaaatcctggggcaggagtcatcagtcatttagtgtgcttccagaaggaatcaaaggagtagctgttcaagcaggggaaaggaatgagaaaagaaaaaacgtagagcaagtctgttacttaagaaaaacacagaaccaatgttacaactaagaatttcagagtccttggctgtgagtcaggtgtttggtgttatatagggatttatcagtcactggttcagaagaatatcggataacctctgtgaaataaatgagaagagcataagccaggatgagacagaattcgtaatgagttccctcatcacatctcttggccaagaaaaacatgcactttctccagaggcagaatttttcttccattctaggaggtggaggaacacttggagtatatgtagtccaggctttcagatgagcagtttcactagcagttttttgtaatctactcataaataagtgaaaagagaaactgtgaggtaactggagtctttctgtatcaggaatagcatctctgtaaaaacaagttagtcctgtgcttaattcctgcctcgatacagagctgtccgtctggtgtgaatatatgaagccagcgttctcttcctgtctcccagaagggcggctgcgtgtgacagcgtaaatgtgtgacagtatgtgaaaatgtttctgtaatcctgaagatttcagtagtgattagaagagctttagtctttggtcaattttctttgacttggaaagcataaagaatatttgaacctctcatttcagactgaccttgactttcctcattttattttattttattttatttttttgccttagatcatccagcccctcttagaacttgaccaaaatagaagtaaattaaagttgtacattggacacctgacaaccctctgccatgaccgagaccccctgatcctccgtggactcactccaccagcttcctataacttggacgatgaccaggcggcttgggagaatgagctgcagaagatgacccgggggcaggtgagcctctcactcaaactttgaaaagagcctgtgaaaatccagttgctgtgtaggttgatgcagtgggggctaccttggggaatccagttgccgtgtagttgatgcagtgggggctaccttggggaatcccgttgctgtgtaggttcatgcagtgggagctaccttggggaattccatgtttagattcaagatttggggggtggggaggggtttccagatataatttttaaactgatttttaattgattttttactgttttatttttttaattcaccaattaaaaatgtatgtttctcatgtacaacatgtaattttgaaatatgtatacattgtggaatggctaaatagagctaacatatacattccctcacatactttccatttttgtgtgtgtgtggtgaaaacactttaaaatctactctcagcaatacattattattaagtatagtcagcatgttgtacagtagatttttttttttttttttttttttttgagatgaagtcttgctctgttgcccaggctggagtgcaatggtatgatctcagctcactgcaacttccacctcccaggttcaagccattctcctgcctcagccttccgggtagctgggactacaggcgcgtgccaacatgcccggctagttttttgtgttttcagtagagatggggtttcaccaagctggcgaggctggtctcgaactcctgacctcaagtgatcctcccaccttggcctcccaaggtgctgggattacaggcgtgattcaccgcgcccggccagttgtacgctagatctcctgaaggtaatcctcctgtctagttgatattttgtaactttcagcaacatctttccagcccctggtaaccaccattttcctcttcgattcaagtttcttggcaatgaatagtcttgaacagatatttggaattaccttttgaaggaagtacgattcttggctcagtgtaacttactcaagtatccgaaagggctgatttataagggagaaggctaaggacgatctgttaacattgccatcggttattccatgaagcggtagccactgaaggaaagtctgagtagtttaggttaatcccatgtcttagaccattcaggtagctaaaacaaagtaacacagacagggtggcttataagcagcagacatttattgctttctgttctggaggctggaagtcccagatcagggccccagcatggttggtttctggttccttgtgtcctgtcgcatgctgctgacctcatgacctaatcacctcccaaaggcccacctcctaataccatcacgttgggggttgggatttcaccatatgaattgaggggaggagggtaaacattccatctatagtactccctagacgacattttctgtttactgtcacttgtaaaaatccagtgattctcttttttacatgttgtgatttttaatgcagtaaaagacagggtaaggctagcctggagacaaaaaatcaggaataaaagaaacagaagacaggatgagaacaggcatacagtacagacatggaaagtgaaggaaagaaaaagtgaataaacattgagacatagaaacagaaaaagagaaaaataggtcagtttttgaaatattaacttaaagctccttttgctcctagtttactgatagaagtcagtgatattccttaccccctatagattcaatcataccaacagaaggctaaagaaaggcacaggtggtgtaaacttactaaaactcttcatcagaactttgaagctacttactatttctagctaaatactttctatttcttaaatattgtttgtttactcgtgtgtgaaggtaaattgtatttaatacagaacttcctgtggtgtgatattaaagatgacagtgaaaacccgcaagtcaagaaatgcaaactggtgagccttagagctgtacttactttcccgtgatgtggatgttgcctaataatacacggacatatttcacagcctaactagttacccatcatttatttgatgtgtgaagacaaggccaacttctcaaatttagcgtgttgacataggaattttaatctctttctttcttgaaagaggaaaaaaatgtaacgaacagtattaaattcagcgaggtgctgtggctcacacctgtagtcccagctactcaggaggctgaggcaggaggattgcttgagcccaggagttcaaggttacagtaagctatgattgtgccactgtgctccagcctgggtggtgacaaagtgagaccctgtctctaaaacgaaaaaaaaaaaaaggacagtattaaattcaattcctaatagctctttttgatattgataaccatatactaaaaatgtaatggaaataaatacatacacaactacagtgcaaccaaaagcccattggaaacaaggcacatggctattcattttagagacttttgcttcagaattttgcagaaaaacgatgcttcttaaaagcagtgctactgggcacagtggctcccacctgtaatcccggcattttgggaggctgaggtgggagaatcccttgagcccaggagttcaaaaccagcctgggcaacatagagagacctcgtctttaaaaataattaaaattatccagacatggtgtcacacgcctgtagtcccagctgctcaggtagttaaggtgggaggatggcttgatcccgggcagtcgtggctacaatgagctgagatcgtgccactgtactccagcctgggtggcagagtgagaccccgtctcaaaaacaaacaaacagcaacaacaacaacaaaaaaaaaaaaacccagtgcttattaatgtattaaagtttaactggcattaaattattcctttgtaaaacagtttgtctttgttttgtttttgtttttgtttttgtttttgtttttgttttggagacagagtctcgctctgtcacccaggctggagtgcagtggcacgatctcagctcactgcaagctccacctctcaggttcaagcaattctcgtgcctcagcctcccgaacagttggaactacaggcgcgcgccaccgtgcccagctgattttttgtattttagtagagatggggtttcaccatgttgcccagtctggtctcgaactcctgagctcaggcagacggcctgccttggcctcccaaagtgctaggattacaggaatgagtgaccatgcctgcccagcttgtctttgaaatggaaaagatatttttgctcagtcctgtattttcaatatgcctagatggacttaactcagtcttaccaaggggaaaaaaaaatcttcagagtgataccaagatagaaaatttcaaactgatttttcagcaagttttgagtgaatgaaacctgattaatagacttcccattgcagattgtgttacagtcaagctactgcactcatccaaacaattgtgctcacacacatgacttccgttaatattgtcatgtttccctttaattgagaatgtacttcagttactgaagttactgtttgaggtgtgtgaaattgtattctccccaacagtccctgcgaaacgagagacctgggtcatctacagaggaatacagtaactaacaacccctactataagcttcttcatagcttctaaaggttggtggagaaaccaacccatttcgtgcttccttaccccaagtaagaatttaaggaagtaatgtaggctgtctaacaatacaaaatgacttgcctatgaaagtattgtgatcagagtttgacttcagctttaacggccaagaaacagaagatgtgagtcactgccaaatatgcatattggtttattttgtgtgcgtgttttgtttatagttttgtagttttgtttttgtgatgcagagccttctgctcctgacatttgcatttttcacctcatatctccaatgcatttcactgccaccatgctgccaccaacaccaccgccatgaggacaggacaagaactttgtctttttcaatgctagggcagtgcagaagggaaatgcagggtcagagcccctacacagtccccactggggcactgcctagtggagctctgagaagaaggccaccatcctccagaccccagaacagtagatccaccgctggtttgcaccttgcgccgggaaaagctgtaggcactcagttgtcagcccatgaaagcagctggaaggggcctgtgccctgcagagccacaggggcagagctgcccacggccctgagagcccacctcttgcatcagcgtgacctggatgtgagacgtggagttaaaggagatcattctggaactttaaggtttaatgactgccctattggatttcagacttgcctggggcctgtagtctcttcgttttggccaatttctcccatttggagtaggtgtatttacccaatgcctgtaccctcattgtatctaggaagtaactaacttgcttttgattttacaggcttataggcagaagggacttgcctcgccttatatgagactttggacttggacttttgggttaatgctgggggcctgttgggaaggcatgattgtgttttgaaatgtgaggacatgagatttgggaggggccggggcagaatggtatggtttggctgtgtccccacccaaatctcatcttaaattgtagttcccatcatccccacgtgtcatgggaggcacccagtgggaggtaatagaatcatggaggttgttacccaccatgctgttctcatgatagtgggtggcttctcatgagatttgatggctttataagggtcctttccgcctttgcctggcacttctgtctcctgccaccatgattgtaagtttcctgaggcctccccagccatgcagaagtgtgagtcaattaaacctctttaataattacccagtctcgggtatttcttcatagcagcgtgagaatgggctgacacactatgtctttctatttaaggtgggtttcttgtagagaacatatatcaaatcagtaattgtcttctgattgaagtgtttagaatatttgcacctgatataattattgacacagtaaagttaaacctatcatctttatatttatttgtttcatctatttttttcctctgtttttgttttcttttaaagtaatttttttttgttattttattttatttccactagtggcttaaagctcaactccccaccccttttaagtgattactctgtggtttacagtgtacagttttaccttatcatagtcaaattttgaaaatatagtataccacttcaggtatagtattggaatctgccaatagtatacttctatttcctttgtctcaaactttatgctatcattggcatacattttattcctccatatattataaaagccatagtacattgttactgtttttgctttaaatcagttatctttttttattgtttattgtgctaaaacatacacaacataaattttaccatcttaaaaatttttacgtgcacagttcagtgttatattcataacgtaaactatcaccaccatctatctctgtagctcttttcatcttgcagaactgaaacgccatacctgttaaacagtaactccccattctcccttgccccatattccatctgccttctgattttactcctgtaagggtttcgtataaatggaatcaggcagtatttgtcgttttgtgactgacgtatttcatgtagcaaggttcgtctgtgttgcaccttgtttaaggaaatgctgtgtcagaatttcgttcctttttaaggctactgttttatataccacattttccttattcattcctccattgatgaacactcgggttgcttccacattttagctctcatgaatagtgctaccgtgaacacgggtgtataaataccttttcgagactgtgctttccgttcttttggtataaaatcaaaagaagagaaattgctggactatgagttaaccctattttcaattttttgaggaaccaccgtactgttttccacagcggctgtaccaactgacattcccaccagcggtacacaagcgttccagtttctccatatcccggccaacacttgttattttgtagtctttcgtgtgttttttaaatagtagccaccctaatgggtgtaaggtggcatcacatagttttgatttgcatttccctaatgattcatgatgttgagcatctcttcatgtgcttattggccatttctgttttttctttggagaaatatctattcaagttctcagcctatttttaaatcaggttttctgttgttgttgttactgagttttagaagttctctacatagttagatagttatccctaatcagatatacgatttgcaaatattttctcccgttctgtggttatcttctcactgttactgtggtaatagtgtctttcgatgcacacatttttttattttcaggaagtcccatttgtctattttaatcatttatattttatagagattaagattataaaataatatttttctcatatgtttaccattttcaaaaatctttgttttttatctgtgtatgtctgaatttccatctgtcatcatattccttctctctaaagaacttactgaggctgagagcagtggctcatgcctgtaatcccagcacttttggaggccaaagcaggaggattgcttgaggccaggagttcaagactagcctggacaacggtgaagcccttatctctacaaaaatttaaatttaaatttaaaaaatttagctggatacagtggtgtgtgcctgcagtcccacctactcgggaggcccaggtgggaggatcactttagctcagcagttcaagattgcagtgagctatgatcacgccactgcactccaacctgggctgcagaatgagaccctgtctcagaaaattaaaaataaattaaaaataaattttaaaaaagaacttccttttaaatgtcttgtagtacacatctgctggtaattaattctatgttttatttgtatgagggagtgtatttttatcaacttccgttatggccagaattgtgtcccccctcccaaaattcctatgttgaagtcttaaccctcagtacctcaaagtgtgacgactatatttagagataagacctttaaagagataattaagttaaaatgaggccattagggtgaaccctaatccattgtaactgatatccttttaagagacacaccagggtacacacacacaggaaaataccacataagggcaaagcaagaaggtggccatctgtaagccaaggagagagaggcctcagaagaaatgaaacctgctaatactttgatgttggatttctggcttccagaactgtgagaaaattaacttctgttgtttaagccacccagactggtattttgttatggcagccctagaaaactgtacaccttgtttttgagatgttctctgggcacagatttcttggttgacagggattttttttttcctctttcttttaatacttttaagatgtggttccattttcttttggcttgtatagtttctgttgaggtctgctatattcatgtagctttgttttggggtgagtgggttggttggttggttgatataccatgttcttttttctcctgaggctttcaaaatattctctttatctttagttttcaaccatttgatgataatgtacctagttgtgtttttctgtatatctatcttgtttggaattctctgagcccctgctctggatctgtgttttgttgtctttcattaattttggaaaattcttggccattatctcttcagatatatcttctgcccacttctctcttctcctttgtaactaccattatgtatttgttagatcatttgatattgtcccatatctcttggatttctgttttgttttgttttctatattttcttattatacttgaagttttctgttattagtttggataatttatattgatctatacttaagttcactttctttttgtgtgtgtgtcataattttttattaaatgttaaatagtctaagtaaaaagaacagtggaaaccaaggtaaataaaacttatgtctggaaatatactttcctcttcttctgtcaggccattagcattggggactgaatcaaataactcactaattgagctgggtttgggcttctttccactctagttaccttcatggtgccacaggccttgagcttttcagtggtggattgccactttcatacgtttaatgtgagctctgtggtgccgatgtttctgtttcatgcttctctctcagctttcagcatgtccttcatgcctgcaccgcagagggcctctctccatgctcttgttcttctctaagcagtagactgttcttgttactcagtgaagactcagggtcgggcaggagtggcttcttcattttcctgctccagtcttggtcttggtacttctgtcccacccccagtgacagacaacatctcccccctactcagcacaggtctagactgtcggctgatttcctaccccttccccagtagcagcagacttctagtttgaatccattcataatttggggtcctactggactccctgtctccttcctggcaacagtttgcttttgcctaatgtcagcacaagaggtagggtagattttgtaccaattctctagcctaggaatagaggccatgaaggttgctgccctacccccagaagcacacagcttttcccttgttctaaaatgttgagcatggaaaatttggccttatgtcttctcacttccgggctttcttgatgtcaagctccctgtcattctgtgtccatgttgtgattgaagaaagcaatcttaaacatgcatattttaggagtcacaaaaaattatttgcagaggattccagaagaaagtttcctctgtgaaaaccttctcttaccattttttacattatatataatttctatttttgtccccaggcttttttctttattgtgtgtgattgtatcaaattaattttaatgaaatatttcaaacatttggaaaaatatggagattaatataacattacctttatacccagaattaacaaatattactttgtcttatcttcttcagatcctttttaatgctaaatatagtatgatattgtgatataataagaaatacacatttggtctcggtccctagttccttatacacagctcctgaaactcttggaatcccctgagtgatgcgtgtttgtttttttaatgctaatagatgactggtggctgggagctctggatggagactggttaccaagggaaccaaccctgtgatagatggttgggactctccagcccacaccccagcctctagagagaggaggggagctgcaggttgagttgattgcccgtggccaatgatgtaattaatcatgcctacttaatgaatcttccgtaacactctaaaggatagtgtccagatgggttccagatagccagccgaacacacggaggtgctggaggtgcccagagaggtcacggaagctccacacccctctccatgtgccttgccctgtgcatctcttcatctgccggttcatttgtgttatcctttgaaatatcctttgtaataaatgggtaaacatgagtaaagtgtttccccaagtcccataagccattctatcaaattaacctaatccgaggaagagatcctgagaactccggtttatagctggtcagtcagaagcacaggtcacaacctgtgattggcatctgaagctggagggtggatactgtgggactgagcccttaatctgtgaagtccgacactgtctccaggtaactagtgtcagaattaaattctaggacacccggttggcgtctgctggagaatctgggtcaggagagttgtgccgactctgtgagattaggaaaaacactttgttttttcctgcctctaataataattaaagtcttctttgtatctcttctcagctgtatttttcttttttcaactacagtggcacagccaccatcctaaattggtgtgcatttttacagtccatatttttagcgttttaatacatatatgtttccataaacaatgtacaatactgttgagtgtgatataaatttaaaatatatcgtctcatactacttaggctgtcagttcattattacttactgaactcaggccctctagtcatttgataatagaagaaaacatattcttgacatttttcagagagggtgattcttagaccatttttttaggggcctaagccctaaagaagccttctttaaaggaaatagattgaggtaatgtcaaggtggaacacaattatggtacgaagtgtcttgacccagcactaagaaaaaggttttattaaattcaggagttttttaaattgctgcgcaatagaaatacttatttttggagtgtggataatttgatacattcatatgctgtgtaaatataaataagaataattgggatatctgtcaccctaaatactttcctttcttaatgctaggaaccttgaaattctcttctaatcttcatacaatgtacaacagattaacattaactgtagtcaccctattgatctgtggaacactaggtcttacttctatctaactatattttaacccactaatcagcctctcttcagcacgccccaacccccttcctggcctctcaagttcagttttagatttcagcatcttctctgtttactttaggatgctcccgtatctgaccactgttacttagctttcagaatcgccgatcactgaaattccaggtccaggggttctgcactgcgcttagaatttctcctcatgtataagatgtgctggttgcaccgccaagccctgttgccgtctgtgggacaggaagccttgttagtgcctccatgaatccagcactgacattagctcacgtagaactaacatctactcagggagttgcgttagtggctcttaagaaactccatgaaaattgtgagaaaacttcaatgagaacgtttttgacaagtcgcctttcccttgtatataaatgcgaaccgtttttcattttcaaaatttcaaactttttcatagaactcaaggatttgagtcctgcttcctttgagaggggtaacagtgagttttacataaacactgtgtatgattttaaaaggcagtactgaacatgtgctacacattaattccttagtttcgaaagatgcgacggagtgggaaagttcgatatccacaggtgcagatattggaaagaccacactcaggtgtatgatctttctcatagctgcaagtgactgtgttcagctttccaatgaggtgaggaaacatttatgggcctcctatggctctcttattcattcaccactgtgctgtgtaacacaatttccctgcaacaataaacttcaactttgcaatttgtcaccagtgcaatggctcatgtagttataaagtgaacgtggtgaccaatttggggcgtaatattgttctgcagtcaaagtatcctaatttgaagaaattttatgtatcgtgattttacaccaactggccaaagtcagatagtctgattaaatagatttggttttggctaactatatgtagttaattctacacactttaaatattttggtttgcaggtattttttgaaggcttaagtatttggtttctgtttctttgggtttcctgtctgtagattctaccaagcgtatgttgttgaaataatgaattcagggccaccttacccctagctgcaatcttgtcaagttccagcagctgagtaaacttgggtcaggtcagatttgagacaccctatgaccaagaagatattatttctaaatatcttgtatacattgaagaacagccattattttatctcttcaaggtaattttcttatctagttcatgttatgttttttacttcttttgaattatataaaattggaagttatatttataatattgttgtaatgtgaggccaagggggagcacacatcagaagatggaataagcaagcagaagctcggatctgagtctcacagtactccagatgcagtgagtggttctggagctgtacttctcaaagagggtggcagctctcagagagggtggggccctcagaatcaccagaagaactgtgttctcttgcattcccatccccataattctaataatctagagaaaatgaagagagaaaaaataaggtgaagccaggagtgagctcgcaggcattgtcagagatttaattattgtcatgtgctacataacaatatttcagtcgatgacggaccccatgttccacagtgctcccgtaagatgataagaccatatttttactgtaccttgtctatgtttagatatgtttggatccagaaataccactgtgttccagttgcctacagtacgtagtacagtcacatgctgtacaggtttgtagcctaggagcaataggctgtaccagacaccctcggtgtgtagcagctataccacctaggtctgtgtaagtcagtctgtgatgttcccacaacaagacctcctgacgatgcatttctcagaatgtatccccaccattaagtgacatgtctgtagtatgcagtttatagtaccccacgatattaaaacagaaacagaaaaagaaattcctccctcatgggtcctcataaagaatctgatcgtaagcaacatcttcagcatccttccatatgtacagccgtgaggttcagaagacttctttttttaagaaacatctcagcaatataataaggccaaagttcatctcataaaaaccgttttctaggagaccgtaaatattgctactcaaatatctaatatattatttaatattgggaataaattttcaagtctttggaaagatttaggcagtactctctaaatattagttgtctcaaccatttttttatacattaagcagcaatatgtttaggatctagtctttgacagataccagaatgcagctattcagtgttcaagtatagagtcatacactttaaaagttaatcgaaaaaggaaaaaaaaaattagccaagtatggtggtgcatgcctgtggtcctagctacttgggtggctgaagtgggagggtcacttgagcccagcaggttgaggctgcagtgagccaagatagcaccactgccctccagcctgagccacagagcgagaccctgtctcaaaaaaagaaaaagaaaaagaaaaaaaagttagtcaatctgccccttccccttaatggtggctgaggaatcagctggcatggtcagtgaggctggtgccaagtgttcaactgatatagccaaaatgactggcaggacaaaggcactgggtttgaccagcatggttggcatatttggtagtggagctggtcctcaggatcatgccctgggcatttggcaggaccatggattctgctagcatagctggtgtgtttgtcatgctgagaccaagaagccagcccacatggccaacatttttgggaggcgagggctgaggattcagctagcatgagtggaaatagcaggccagggccaagaaagtggcccacatggttgagagactggttacataccaggagatcaagcaaatgagtaaatatattggagctaatatattgaggatagtgtgtttgttattataggagataagagtaccagatatagaaagagtaaagacaaatcctatcgtattggattgtttttagaggtattgatatgaattcatggtttttaacagataaatagatttagatttctctgtgtgtatgtgtgtttatatatgtgtatatgtgtatgtatacacatatacacatgtatgtattttcttttttttttttttttgagatggagtttcgctcttgttgcccaggctgaagtgcaatggcacgatcttggctcaccacaacctccacctcccaggttcaagtgattctcctgcctcagcctcccgagtaactgaatcggattacaggcatgcgccaccatgcccggctaattttgtatttttagtagagacagggttcctccatgttggtcaggctggtcttgagctcctgacctcaggtgacccacccaccttggcttcccaaagcatgtatgtattttctaaccttatctgctgaagggacctggaagcagtgacacccagtaacagagagctcacttactactcaaatgttggtctagatgccttttcccaccagaaggaaccagagctctttggggaaatgactgagtctagggctgtgtgtgggaaagcacgtgataatcccagaacagttttataccagaaagtaaggaagcattccaagagtggtggggatgtatcaaaacaacatggggaaaatcttgaggaattcgagcatcaaaataagtaaagatagtaacagattataacaactaatatagagagagtattgcctaaatctttccaaagacttgaaaatttatttcctatatcaaataatacattaggtttctgagtacttgggcagcaatatttaatttagggtctcctagaaaatggtttctatgaaatgaactttgacattatgatattgctgagattttttttaaaaaagaaatctctgaacctcatggctatatatatgaaaggatgctgaagatgttgcttacaattagactttttatgaggacccagggggagaaatttctttcagatctctggactagaaataatcaatattctattgaataaaatagaaatctttgagtctgtgatggtataaagaagtgaatgaatgaatgaatgaatgaatgaacaagtaaatgggggagaaaggaaaactccaccctgtggttgaatgccagcataatgtagacggaattatggaattagagaatctgcatttggcaccattatagtagtgactgatttaggcaggtatcatcaatgaatgtgaaaacaccaggtgaaggttgactaagaacagactatttgcatagactgaaagtatctcgtcaaacacacaaaaatgtatgtcagttaattagcacaaagtatttatagttaatttacattggaaaaatctgacacataccatctaaaccaagtgattaaggttagcatctccagtagtgggacacgtcaatgtgtgcctcttcatcataggcacagagaagaacacaggtggtactcttgccaaacaatcacctgaatttaacaccaggaaacatacatagagtgatatagatagagatacagataacgatacagatagagacagatgtgtatacacatgtatatttatcaagatagagaattaattaatgaatgatatgacaaatgtaaaatgttagcagttaaggaatccaggtgaaatttataccagaatagacttaaagatttctgttttattcagtgagttataatattttataatcatttatttcaatgctcaaattctccaagatgtttcccgcatccttctaatatatgcccactactcttggaaaacttccttactttctggtataagatgttcttttgaaattattttaaaataaaaagtttttaaaaacttaaatcagtaaactaggattaagattttaatcctcttgtgaaaattgagaggcacaggagtattgaaaatacaagtattagcctaaatagccaaccccaaggtaacacccacaggcagccgcaaaatggtgccgtggcaggtggagctttgtgtgggctgagtcggtgttaccccatgagcagtgctgccagttacaccaagctccacccatcgctgcaccattacaagaggtaaatacgtttgaatgcgacatccatttcattaccattacagtgtttaattgtaaacattacaagaaggcaggtttaagtttaacagaaagtgaaacttcctagatctctccacaaaaagaatgggcagccatatttgaaataagtccttttgactggagagaagctactcagttgggttataaaaaggattcaggattgcaagatgatttgagtcagcttgtttctaaggtggtggtggtggtgtttttctaaccctgattgtctattatctagtataacagggatgtataatagccccctcctcccagttttaggacagtatttgaatgtgacatcctaacttgaactccataaaaaataaattaggtaaaatagttgaaaaggggaagaaaggaggaatgaaaaatgaacaattgttttgaaaaggcagttttcataggataaagacttgcctaaacgatgaggaggccctttttttttttttttttttttttcatttttctagttccacttaggatagaccaagataatatattaaattacaaaagaaatattttagttaaacatagggaacagctgtctgactataaaactaagcaacatggaaaaaattcaaaagaatgttgtagaatttccttctggagagttttaaaaactaaggttgactccccatcacttagtgcccatcccaacctcaccatacttgtcaatattgtacccatttgatacagatcatctcatacaattagccatatggattatatatgaatatgagacatgtataacctgtatgttgaatgattgaatatttttgaaagtgcagctttcgtttttaaaacctttgtcgcccaggaattttagataaagccaacgtttttggctctaaaattgaactttgagccgggcacagtggctcacacttgtaatcccagcactttgggaggctgaggcaggcagatcacctgaggtcaggatttcgagaccagcctggccaatgtgggaaaatcctgtctctactaaaagtacaaaaattaacctggcgtggtggtgggcacctgtaatctcagctacttgggaggctgaggcaggagaatagcttgaacccaggaggcagaggttgcgtgagctgagattgcaccattgcactccagcctgggagacaagagcgaaactctgtctcaaaaaataataataataataaaataaaactgagcctttgtagcaatgggtggttgttttaagccttaataaagaaatgtgttttaattccagatattaaccaaaaggcacctaacatatattgctaaaactacccccaattcagcaggcatagagacataaaacactaaacttaagagaacaaaatggtaaataggactttatcaaactttaaacttctattcatcaacactgggaaaaaatattcactaaatacatacatacacacacaaaaacacatacacacatgacaaagtacttgtattgagaagatattttaaaagtcagtaacaaaagatatttaatagatatttagtatctattagatacttaaaacaacataagtttttaaatgggcagaagacttgaacagactctccaaatatacaaagtaagcacatgaataagtgtttatgcaaatgaaagccacaaagagatagtactacagtatcactaaaatagctaaaattaacaaaactgacagtaccaaatgctcgtgaagatatggagcaactggaactctgatacactgtgatgagagggtaaaatggcataatattttagaaaactgagaagcagtttcttatagatgtacatctatcctgtaacccagggatcctattcttactcaaaagaaatgaaagcatatgtccacaaaaagacttgtacaagagtgttcatagcagctttactggaaaaagtccaaaagtggaaacaacccaaatgtccattaacaggagaataggtatttttaaatgatcatatatcattaatggaatactactcagcaatagaaaagaatgaactactaatacaaacaactgaatcttcagaaacactgtgttaagcaaaagaagccagacacacacaaaaaattatgtactaaatgtattattccatttatatgacattcaggaacagaataaattatggtggtaaaaattagaacagtgattacttataggaattgactgaaagaggataaaacagaaccttctggggtaatgaaaatgtcctatattttgactggggagatggccatgtgggtagataaattcatcaaaattcattcagttgtacacctaaagatctgtacattttgttatatggcaacgtttaaaaaaaatactccgcctccagtctccttttgaactgtttgaagtagtacaactgataggcagattctgctaaaaagctaaaaatataatttttctctagagtacaaatttcttttttttttccaccgtaaatgccagcctcccatcagaggctgaaccacagtggaatcaactttcatcagccagcccctctgtggctcactgagctttggattccaggtccctttcccagcacttagtcccatttttaattttcaggaagtattgttccaaaacttggctcagacttatcctctccttggattcctttctccatttgttttctcggttttgctcacttactctttaacttgcacccctctttttccaaggtggtggattagggggtgttaatgctggggcagtgttaggcacagaacctaggagtcatctccctcactccgggaccgcatcaatcatcagtcacagacatgacagttcatttttccctcctgaacgcgcctgcacagatgggtgtatcgctcaagtagccaaatggatgtagctgttgggggacagggcctgaggggcagcagggagagaaaagaacaaagaaagaaagaagaatggttctttgtggggcagcaaactttcttctggttcccagcctgaatgtttctgatctggttttcttctttttgtgatgtttgaacttgtttcctcaactcagatgctgaactcttgtccaaaaaacctaagggcagcatagtgtgagagactgtgggaggcaagtccagcaatccagcaaaaagaattgcagaactgtgaagataaatgtgtgtccgtatcaggactgcgctggagaacgggaagagaggggttggggtgctaagactgtgtgtgtgtgtgtgtgtgtgtgtgtgtgtgtgtcttgacaaactgatgagaaacactattgagtagttttctcctctctgctctcacacacagtctggcactttcttcttctgtgacagctgccattaactttttaatgcgaagacaagggtatcttgccaattggatgttgaaatctctggcaaggaaaagcttgctttaaaaaaaaaagaggcagggaatatggggaaggttgggcagacataccaaaggtccgggggaagacagggtactaagttggaccttacaatgcagaatggctgccctgcttctgataaaatcccctcaaatgaagttgggaaaagaaagaggaaatgggagtgtgagtgtaagggagataaggaactcttttacgcagttgcaatgacacagatattaagtattatttgcaattcactcccgatggatgtgagaactcctcatggagttttggtgtatatgtgggaccttgtgctaaatgtagaataatcttgtttgtgcagaaagagaaggaaagagaaaatattaggagacctctgtagaccaaaacattatgatacaaaagattgttccagtcatttccttccatagcttatctcagagaaggggagttctggtgttcgtggctcgcctatcaggtcttcccctcacctctaaactacggcagctcttgatccttattactggtacctaccccaaactcaccaggtctaaataaaactgaacataaaaacatcctgttgtgaattcagttctcatgtaccttcagctttgcagcaaagaatgcaaaagccttttttttttttttttttttttttttgagacagagtttcgctccgttgcccaggctggagttcagtggagcgatctcagctcactgcaacctccccctcccgagttcaagcaattctcctgccctcaccctcccgagtagctgggactacaggtgtgcaccatgacgcccagctaatttttgtatttttagtaagagacagggtttcaccgtgttagccagggtggtctcgatctcttgacctcacgatctgcccacctcagcctcccaaagtgctgggattacaggcgtgagccacggtgcatggccacaaaagccttttttaatctagtttttattagcttggcctcacactggactctttaaaaaagagtcctaaaatatgaatatggaatattatatgaaatattttataaaaatattttataaaaagctcagcatttatggagatcttagtgtattttagctgccctaattgcttttttcctttgtgttgaacgtattcccatgggagaagaaagttcaccctcctgagtccctgagctcctgcaggaagaattatttaccatcctggaattttaatgagtcttgacaattactgtaatccaggtcattgaacgcgggtctgtcatcgccagtgtcatcttccagagatgatgctcccccaactaagctgagaagaaaatgagtccttgtgaatgccaaagagacatgaatgtgacctgcaccaatgctgcaaacctaaagccagtgggactagaaactgtggaaatgacagtcttccggtccggtcagagcatctgaaataaattgcccacagttttcttccaaacttttaaattgtttacaaaaggtttggtggtaccaatcttactgagacggcctagaaatacaagtaacgtaaatttcttacagagtgtctacaatgctgcatgccagaggcactcagcacacctgaaggatgtgaagctcctgtaggaacagtagctctgtacaacagtaatctctagacaaccaacgtaaatttaaacaaaaaggtgtgagaccacacacccttcttccagtggggcataactgcccaggtgtaaaatcagacaggaaccctgaaatatgaaccatctccagtttgcagacagacattgctgccattctccacttgactcccctgtgcccatgcctgaaagccccgcttcccctagagaggtgggggcagtgtggccacagcctctctccccgcagtaccacctggtcccaaaagtcccagccctccacggcagcactagtgaggcctccttgctgttgctgctgttactccctgagccttctagagaatctcctgcatgccctgtgagaatgtgctgatgctggggccactgccacagtcgcgggttttctcccagacccccttctggtgccaagtaggaaagatgggaccaggctaattctgttgccactgagacaagtgaagacatatcctgatgtctggagttggatctcagaaggcgccttccagtgtataaactgatatgaaatggtggttaggtcctgtggcactgcacaccaacactgtattaccttgctcgggacaccgtaacaaaataccacagaccgcgtggcttaagcaacgtaaattgatttcctcacagttctggaggctggaagtccgagatcaaggggtcggcagggttggtttctcctgaggccccctctccttggtgtatacatggctgcctgctcgctgtgtcctcacgtggtctatcctctctccctgtgctccccagtgtctttctgtatgtccagatttcctcctgttacaaagataccagtcatactggatttggaaccaccctgcctgcctcattttaacttaatcgcctctttaaaggccctgtctccaaatgcagtcacatcattctgaggttctggtgatttaggcttccacctatgaatttggtggggacacagctcagcccaccacagacattatgggtaaaataggctcatggcaacaacttccgaacctaactactgcttgggtaattgttaagggtttcaaaataactgactgtcaaacaagctctggaaactgcattccaaataaactgtggggctctgcctgttaaaaggtaggaggtcctggcgaatctgttatgtccagtaattactgaatactcccttaggggccattcagggtctgctggttacttcaataaagaatgctgtaagaaaagcactgagtctctggccctttctaaaagagttgtgtaagagacataaagccataaaatatgaagtaggtgcttgtttagcgactgaatgaaatcaggaattttccggagataagattatggtattcttctacactgtataaatgctatcttcctgctttgtttacctctttttatacaaaagaccacctaggcacaaaaggaagtgcccctacctagcatagtctgaacgagtgaaagagagtctttaattttaacactaaagataacagatcttgctgtaaagtgcaatgatgcttaatagccctaaagatcaggttgtgattgatgggatttctcatggtgttcttgttaaagataaatagtagtttttaatgttatcagactggaaacatcttactcttttctaatgtaagctctaaagcaaacttcggacactaacatcttattgccaacttaacagaaaagtgtgatgggatattggataaggctccgacctgcgtgcctgaaatttcagtggttcggtttgttcctttgaatgaggcatctctctgaggcactgcctttctaagtgcaagttttctaggaagggcagtgtgttgtcagtttctccttagcgtgcccagtgtatctaggatgatacaaacaggaagagactgggaaaaggagggttcaaaaaagggagggacccaatggccagattaaaaaccagcttaacctcttcattgtatcccaggcctgatgattgagcatctttattcttaggattctccaactttaggctacctgatacatctagagcagcggtccccaacgttttcggcaccggggactggtttcacagaaggcagtttttccacagacaggggagtggcagggaagggatggtttcaggataattgaagcacattacatttattgtgcactttatttctgttattattccattgtaatatataatgaaataattatacaattcaccataatgtagaatccatgggagcccagagcttgttttcctgcaactagactgtcccatttgggagtgatgggagacagtgatagattatcaggcattagattctcataaggagcacgcggcctagatccctcgcgtgcgtggttcacaatagggtttgcgctcatatgagaatctaatgcctcagctgatctgacaagagacggaactcaggcagtaatgcacgcaatggagagcggctgtaaatatagatgaagctttgcttcctggctagcccttcacctcctgctgtgtggcccagttcctaacagggcctggaccagtacacggacccagtactgggagttggagactcccgatctacagtatgtgagaaatcacatcaaccttttacaaggattgagcctaaatttgaaccaaaaaatacttacttctaaaagtaagtaagccacagatagatgtcagaatacaactagcaagaaggtaaagactcatggaaaagatggagtaatgagttttcttagcactgtatgatacgacagaaaagctgcagggggaaggcttcacgaaagcaaaaaactccaactagaaatagcctgcaggggccaggtgcagcgactcacgcctgtaatcccagcactttgggaggccaaggtgggtggatcacttgaggtcaggagttcaaggtcagcctggccaacatggtgaaacccatctctactaaaaatacaaaaattagcccagcattgtgttgcacacctgtagtcccagctacttggaaggctgaggcaggagaatcgctagaacccgggaggtggaggttgcagtgagctgagatcatgccactgcactccagcctgggcaacagagcaagaccccatcaaaaaagaaagacagaaaaagagagagagaggaaaggaaaggaggaagaaagaaaggagaaaagaaaggaaagaaagagcctgcaggctctcagggatcactgttctactgttattttataaggcaaaccagggatgagctgtatttagccacagattattaaatctggaaagaatttagaaatcatctaatctcccctttatacacataatgaagctgaggacagagaggctcaagatggtaaagctaagtggcagagttagaactagacatttcttccatttcagaccttttcccactacttccctgtgcaaccttgggaagaaagtcctcttagcctgtcagaggcatctctgtctgtaactgttctccttcacgaatgttaactcctctgcaggatgccacagggacatttgccttctagtgcaagcagagtgtttcaggaatgcataacagcagatagatacatgtctgtgctaggtgttgtgcactaaccaagcactatggatttcttgcagggagaaaaaggaagagtagataactaacaatatcttattaagagtctcctgcagggctgtgactccacgcagctctcttctccctgtcctgctggtgggagccttgagcccagctcttgagcactgtctggtgtggcaccctgcaggctgccagcagctgtcatacgggcattgggatcgttggaaagtgctgcaacatgggagtagctggggcagctgttgattgggagcagcctccacgggctgtgttcagtgggtgattccatgcctttggtctgtgtggagctcactctctcccttggctccttcggaggggtgggcccaccgccctctccagctgttttctcagaaagagaggcaaagaagaaggacctggcggtccttccagagtgcttgctgtggtgtgggcttcgcctcccctccgtgtgggaataaactgtgtgaagccatgtgggtcctggagctccgtggcttcacccacactttctgggggaactgcactcacaagtatggagagccttaagcattcgttgagccagactggactggaaacgtcccgggagtccctcattctcacccttcttcacctaagtaaacacacaacaaaattctctgagctttagggggctgtgggaatatttttctttcaaccccaaccttccccaagagctttcaaatcacataaagtactgttttccctttagcaatccaaaactagtaacatgcaactccaggccccaccccaccccacccccatcctcctcaatgccagccaagtcagacacaacttgccatgtccctgtggtgtgccatgaactgggcaggtatgccccggggtcactcagagcagcccacgggaccctagagctctggcagtcgtggaaccccttccatggcccttgtgagttacggggccaggagtttgtatcacatcaaagggtcatttcgtcatctcacaagggagtcaggagataccacccagagaatgtatcagatttatactaaaaaaaaaaaaaatccagcaagatccatagctctctgtgggagccattccagtttctccctgtcacagtggccctagaatcagataccacgcactggaaatagcagagtgcaaccctggacgtagagggtgcattgagcacgtgccactgtggctggggggaaacttccttctctcttcctgcctggcctgagagattgcctggacgtggatcaggctttgtgctggtttagcacttaaatcttaactgcaacaaagccttgttcttaccaccctgacagtttcagcattaggtttcttattagttgtttgggtttggggttttttttgttttttttttttcttcatcttctcccttttgacacttttcatttctgagagccaaaccaaatacgctaggcggactagctaacctggctgtgtctgcgattcccagagccctgctgctgctctgatgggtccctttggtaaggagggaaatttttctccatttttataacgacgagcccttaatttgaacgtctctgttcacttcagttaatagatttgtaagaaataatgtgagatattaccaaatcagcttagacaaccagattaaaaatctgcctcactgggaaatctgcttctttgtttagaatactccacactttctcaagcctgcatctgcaaatctttggcctgataaagacttccagagtccatccgtccatctcttgcttcaggactgtacttcgtccaagcattccacacagaagggtaactggcttgttctttgagtgggataccacgtcacagttcctttggtgttccagggacatttctatacaagagatggtcccctgttttcttagtgtatagaggctcatcagaccaatgtaaatctcctgttgagttttatttttttaattcccatttttgtcttttatagtcatgttttctgttctcttgccaaactcccgtgctattcagctcccttcccagcttgttcagaaaaggtataacacccacatcaagataaaacctgctgagcatggtggcacacacccgtagtcccagctgctcaggaggctgaggcaggaggatcgtttaaggccaagagttcaagacccacctgagcaacacagcgagaccctttctctaaaaaattagagaggtataacttttcaggaaagaggataatctggaaagttgctgtaggcacagactatcacgtagaaaaaactgaaattatctcagctagggaagaatgctttaggcaggaagacagccagaattttagaagtgtctagacataagtaagttagaaattaagatatgagtatgttggtgacatctgcgaatacaaaatataatcatcagaaagcaaacatttgttctggattttgtccagataacggtttaaaactgaagtgttgtatctattgtagtgcgtggttccagctcctgctgtacatgaggaggttaatttggagtgacaggtgttagcaacacgtgtttcttggtcctgtagattgccactgacccaattcatttgtccacctttgctggggttacttggtctctcagttgttgactttcacaaaataatggttgactctaaccttgcaaagaataataaacaactgtgagtggtgacagctggaagaggtctgacagctagcaagaccagattccttgtaaagctttcctctcaggtaggggagacttcctctttttctccatggagagcttgtgcacctggatgcagtagagcctgatccactaaccactggccaggcgtgatagatacatattaagttttcctacaacagatagatctatcagtctaacctgtgtacctggccctgtacctcttgagacctcagctgtcttacttgtaaggttagagaatgggactagtagttcctgtagctcccttccgggctgatgagtctaaatttcagaattggcctgttttgggtgtagcatttgtaggtctcgttgttccattgttgggtatttgcctgagctgcaggtcggggataggggacagggtagaaaactaaatgataatttatgtttttatatagattcactagaaatcttaactgttttatttcttttagggctgggggctgccagtgcagttgcagagttttcagtgccatagctgggaagcagagaagctcttgatttgtttttgttttgtttttaacctttgaaaatgaatggcagaaatatgtgatgacctaacattaaaaaatctaggccaagcacagtggctccccactataatcccagcactttgggaagccaaggtgggaggattgcttgaggccaggagttcaagaccagtctgggcaacatagtgagacctcctctctacaaaaaaaatttaaaattagtggggtgtgctggcatttcgctgtagtcccagccactcgggaagctgaggtgagagaatcacttcagcccaagaggtagagattgcagtgagccgtgatcacaccactgcactccagcctgggcaacagagtgtaaccctgtctcaaaagaaaaaaaaaaagagaagagaaaaggaaggaagggagaaagaaaaggaaaaaaggaaggaagggaaggagggaggaaggaagataaatctagctaccctaaggcatatggctagcattcactcagtaaatacttaatgaacacttattacatgccaggcataaagtgttgttgataatacaagaaagtaattacatacttgagtttccctcccatccagggaatctcatcttctatcatgagggaaagaaaggaggaagtccctttatatcaccacttgaatctggaggagatgactgtgaactatcaaattgttaagcagtggaattttgactttggatagacagacccgaatggagccaaactcttgttgttttttgtttgtttttctgagaaggagtctcactctgttgcccaggctggagtgcagtggtgcgatctcagctcactgcaacctccgcctcctgggttcaagcagttctcctgcctcagcttcctgagtagctaggattacaggcacgcaccaccatgcccagctaatttttgtatttttttaagtagagacagggtttcaccatgttgatcaggctggtcttgaactcctgacctcgtgatccacccaccttggcctcccaaagtgctgggattacaggtgtgagccactgcgcccggcccaaactctcgtttttattatgccattttgttcaaagttagttatgggagagcagtaacatcttatttacttttggtctaagcaacagcctttccttcctgtaaaaacaaattcatacattgcctggcaagggagttcatcacaaagtaggaaggggagctgggtgtgatggtgcgcacccgtagtcccggctactcagcggtctaaggcaggaagatcacttgagcccaggagttccaggctgcagtgagctgtgatctcgccaccgcactccagcctgggggacagagtgagactctatctcaaaaaaaaaaaaaaaaaaaaggacagggagggagaaggagaagtccccacagcagcctcacagccattaccacttccggcccacttgcacagtctctgcaagtgcagacttgaaaggaaagaggactttggagttaactttaatgagtgggaaataaacataggataaattcttcaagagcaattttagttttccctggtactaagtgctaaagggattctgtagagtcaagaagtgaccagatgcctgtagaaaaatagatccctgggcaaaaaagattgaggtttagagggattgtagagggttagagggattccagatccctctgactgtgtaagttttatgtcttattcaatagatgctcttacggcaaaatacatttccatttattccagttgtgtgaaattccaaactaggaagttattttatgtcttcgtatctcctaagaagcctgcagattcaagttaggggcttgtgggccagacctggccaggacgagcaccatttccacttgatctgtcagctccaaaaggctccgaacatcatgccagattacagctcagacctcatggcctgtgacacatcctgggacttagctgttagaacctcaagtttagattcttgtctgcttaaaccaaactaggcatttctgaataatttcctgccctccaccaaaccatctgcagaaaggaattaatctgagtcactgccaaccacagaggaattcattcactgacccctcttgtaaccgtcccttctttatacccatcaatacatcctccctttcacctcatgctttgtgactatgaatagagttgtttaccttgaaatcaggccaagtccacagaacttttaactgtattttctcttttacaaatttatttcacggagttctggtagctctctctaacatctttactagagagaaaatgttgtttctgttctaaaatcatgacttgtgctgagcggtaaatgtttggggcagtctccctgaatcaagcagcccgcccctcagctctgcttctctttctccattcagccccctcgcattccttattctttagactgtcagcttgttctctggcagttatcctaacactcaaagagggaagggggcctgagtggttttccctgtagccagtcgtaaccatgcttttgtctgccatatgcttggagagcctcatctctgaaatgttcccgctctgctgagcttcctccgttcgtttcttccctgcacagtggtagggtgaggcattctccccttccctctgctgcatacgcttccagcctgtgttgctttgagcattcagattgagttgctcttgcatttgtgattcttggctcaagtccctctagaaatcatattactactctgagttcagggagggctggaacagctactaagaacagaatgcattttaataacattcaacacacaaaaaagccagagaatttctgccagaggccaccttcgtatcctatacttgtcccgtattccatcccttaagaactttaaacacagtggagtgctacactgtatggtttatgtgccctgctgtctaccaaagggcctgtatcatcagattgttttggtttggacatgcttcaaatttgaacttaaatagctctttagaacattatcgaggcctttccccagaattaatatctattcctttatttcattcaccattttcagattgtctgctacgtgcaggccttttgttacgaggcaatattggtatacaaaaaagaattcaccaaggagcttgaagaacagttggggaattaaacataaaaccaactattgaaaggggacaaaatgaatactgtagcagtttacacttctaaccagggatggcattacagagaaaaggggctcaaccgtgaaggataagaaagatagagaagaaagatgtgtaggaagtaagattgtccacattctagaatgagaggaaaggaaaagcaaagacagggaatggcaggtatgtaccaggagatgaaattgaagcagtagctcccatgccaaaaagcttagtcttttattttgtaggaaggaaatcatttaagatgttggaagaggaggagggaactgttccagcctattttagaaagattactcttacaccagggttgaagtagttatgaagctattgcaagatggtagaacatgagagcttgaattaggattgttaacaaggatatcggaaatgaaaaaactaggctagatgtggtggctcacacctgtaatttcaacattatgggaggctgaagtgggaggattgcttaaggccaggagttgaagagcagcctgggcaacatagtgagatgtcatctctttaaaaaaaaaaaaaaggctgggcaaggtgactcatgcctgtaatcccagcactttgggaggccgaggtgggtggatcacacggtcaggagatcgagaccatcctggctaacacagtgaaaccccgtctctactaaaaatattttaaaaattagcctggggccacctgtggtcccagctactcaggaggctgaggcaggagaatggcatgaacccgggaggcagagattgcaatgagctgagatcacgccactacactccagccagggcgacggagcaagactccatctcaaaaaaaaaaaaaaacttagccaggcgtggtggcactctcctgtagccctagctactcgggaagctgatgcaggaggatcacttgaggccaggagttagaggttacagtgagctatgatcactccactgaactccagcctgggcaacagagcaagactctttctcttcaaaagaaaaaaaagaaagaaaaaactaaattagaagaaacatgatctggaaagagcattaataggaaactcacagaagaagtggccaataaatatatattttttaatgttttaccccagtttttggcttcactacagatgggaagaactacgaatgaaaacagtgctgtcatactgggaaggttgggattggttggtttgttggagtccccagtatgttcagagagtgggaaaatggcacccttatttcttgcttatgggctgaatatcagtacagctattctagaatggtctggttacttgtcaaaagctttacacaggtctataccctttgactcgggaattttaagtagaaaatcatagacatgcaaagatttatgtatgggaaaatgtaatacattaatatttatagtaatgaaaacgagaacaaactaaatgtctattggagttaaataaattacaatatattaataaaatggattacaatgcagcccattataaattattttagaagaatattttatcacatgaaaagctgtttaattattgggtgaaaagaacaattcagtaaatagtatgaacagtatgatttgatgtgtaaagggaacattcaccaagagatgtttatcaggcactggaaagatgtgagtctgaaactcagtagaaaaagaagctagagttataattgtgtagatccaccttcataatggttatgtttagatgagggacatagaagagttattatgctagttattatacatgtgatattttctgtgattaaaaaaaaatttaaagaacacctacctcaaaagaaataaatttgaaagaaagtggattaaatgtgttaatcactaaagcacttagaataatacttggcccataataaatgcccagtaagttagttgctgttattatcaccctccccccttttaaagctaaaggtaaacacatttcgctaagcagaggatctaagagagaacagtggacagtctccttagacctcaggaaacccctgcacgtgtgagactgagcagaaagaagaacaacaccaggacagggaagaaatgttggggcaggcagaggagagccagaaacatgtgggtgttgggggcctctagggcagacagcctagcaggtgttttcagggtcagattggatcgtacagttagataatccttgggggtccttgatgggtttttttctgaagttttgaaattataacttgcatacagaaaagtaaacaaatcctatgtatatagctgaattacacactcatatagcaaattcttggaacaagcagcagaatgttaccagtgccgaagccccttgtcatcctccttccagtcactcctcatcctccaaggataacctgacctcaaacaccacagattagttctgcctgtttttaaactttctatgcctggaatcataccatactctattgtgtctggattctgtcattcaacatcatgtttacgaattgtatctgttttgttatacatatagttcattcattctcattgctctatgatattccattgtatgaatgtgccacaaattgtttatcgtctgtttatcattcagtatggacatttgggttgttcccaggttttaatactcttatcagtgtcttcaggtgaatttacatgtacctacaagtccacttgttcagcttggcattcaactttagtagatactgccagatgtttttctaaagtggttatggccatttacactcccaccgggagtgtaggagaggccaagtggttccacgtccttgtcagcacttgatactgtctgtctttttaaattttagccattctggtggtcatttagtggtatctccttgtgattttaacttgtattttcctgatgactaatgagttatccacctttttatatgtctgttaaccatttcagtatactcttgtggtcattcaagtgtcttgcctatttttcattattaactgttgttactgctttataggagttctttatatattatggatatgcatacatcagatatgtatcttctcctgtggactgccctttcactctcttaatggtgtcttttaagagacagaaatccggccgggcgcggtggctcacgcctgtaatcccagcactttgggaggccgaggcgggtggatcacgaggtcaggagatcgagaccatcctggctaacacggtgaaaccccgtctctactaaaaatacaaaaaactagccgggcgtggtggcgagcgcctgtagtcccagctacttggctgaggcaggaggatggtgtgaacccgggatgtggagcttgcagtgagccaagatcgcaccactgcactccagcctgagcgacagagtgagactctgtctcaataaaaaaaagagagagagagagagagacagaaatccttaattttaatgtagatccagtttatcaattttttctctttgtgattattgctttttgtgttctgtttaagaaatctttacattccctaaagatggtctcttacattttcttgtaaatgctttattgttttacccttcacatttatatatgtattcatcatgaattgatttttgttaatggcatgaggtagaaatccaaatgtgttttgcatatagccccaccatttatcagaaagaccatcttttcccagtgcacagtcaagtggccatatacgtgtagggtttttccgtgttctcttttcgtcccattggtctgtgtgtctgctctcgtgccagtgctatgtgtgtgcattgctgccgccttgcagtgacagccttcttccagagaggagcatttgtatagctttgttcttggtggccgtcttggctgttctgggctctctgcatttccacttactctttggaatcagctcgtctattcacatacacacctgccagttttgatatggcttgcatcgactgtatagattagttgaggcagaattcacacctttacagaaatgaggcttccaatccttaatcatgtttattcctccatttaagacattttaacttctccaaatattttatggtttcaatatagaggcttctgtaatctttcgagagggcaatttcagtgaaatagcagaaactaaattctcagttattaaggagagaactcagaaatgcaggtaacacatgtagactattcttttgagaaatttggttacaggaagagaaaagttgctactagcttgtgagatgcagattccaaaagtcttttcaggacgggcaggattcagtgccctcagaagccatagtgaaaaaccaagggaggggttggaaacagagttcactgaagggacagagacatggagagttagctcaggagtgtgggtgctcctgaggcgtgtggaaccctgctcgcctggagaagccaggtggggtcactctgaggcaggacggatccagactccccgggtgcccacgtagtcaacagcacggagctgtcgtgagccgtgccctttgcactgagagcagcagcaagccctgctgccctcacgcctgtcctcatccacacctctaagcccctggaatacagcacatgttattttaacaaagcatgttccattttctctaccgaaggtgtatacttgtacatgtgtcattccaacagtcctttcctccagagtatcttggttaaagtaaggtttggtggaaaggggctttttttttttttttaaataaaatcttgcagtgcccaggaggcttgaggaatattttgtagtagaaatactatatatggaggaaactaaggtgctgagatatgagacttcgtgcttaagttatagaaagggctggcagaattcatgggagcaaacttgttttgcagtttagtgaaaatcggtttactctggaagtgtttttcgatgttttgttattgtttgtttttagatacaaggttttcagcacacgcacagaagatggcatctgcacatctagggagctgattgggtaaacttcagtgctgcccgtaattatggtgtttctaagaaagtaaccaagaagccagtatttttcactgtaatagttgcagtggtgggattacttgccagtattagaaaatggagaatgggaaatggaaaatctcattggattactcctccttacattactgcgtttggatttgtagtcttaacaaggcaataaatggaaggggaaagaaggaatcaattcatggtaactagaatgtaatgagcactttcattaagtcacaatttaatttgtattctttcggaaattcttttctggttttaagcctaaaggggcctgccttgaggaggtgaggaagataagcaggtgtgggagggggtgtgggtagtgggcagggggttgaagagagcaagaatatctcgagtaataccttttaggggaagtttcagacactaaaatacatctttcccaacttatccacagaatccgttgcatcccaaagccatggaaaaactgccttttttcatgtgatgctcatggtaaggaaatgcagacgcccccagacgtcccccttactctgggcagtctgttgcaagctccccagtggatgctgaaactgtggatggtactgaagcctatagatgctgttttcttctatacatatatacctgagataaagtctagtttataaattaggcacagtaagagattaataataaaataggacagttataacaatactcggaacagcatgcactgtaaaacttatgaattgtttatttctggaattttccatttaatatttccagatcgcagttgactgagggtaattgaaaccgtggaaagggaaaccatggacaagggggcgccgccgtattttagtataaggaggttgtgaataatccatttcaggttgtgctttcgcacctgtgctgtataacacattgatctaagtttttagtttgctttcttcacatcgcctctctttcctaagcaatctaaaagttttaacaacacatgcctgtactcctttgacttcagaatgactaaagctttacaatcaaagtcaacaaaataaaagtcgcattttaaaagtaatcacggttacacaagagaagttgatccttgagattctttcaagccaagaaaaaatagaatggatcaagcgccaatgaaatctgtccctgctcagctgtgcccacatgtaatactgctttcagataaaatttgaaccatgcctaatccctggagaacagagaaaggcctcccagatggaaagcaactccagctagtgaaggaacacttccttctctaaacttttcgattctgtgattccctctatttttaaacaccttttcccaggcatagcatacgttagaccctggaaaagcgtagccttgtagtctgcctctggtttttttttctccttaatcttattccaccatttcttgttatacttcctcctccagcgctaaatcactgtcccccttcttgtttacaccctcctggcatgtgtaggtaataatcacatttccctgccctttgtttttacttagttcgggtctccatgtttaggttttctaatcctgcccataaaatgattctttcagcttcttagtcatgctgccatttttctttgaacttactccagtttgtctcaatttttctggtaatgaggtgtctgaaacggaacacagtgcccttaggtgtggcctcgctgaaactgtgtaatggaatggcggtctgctgaggagtgatgcccatgtctggccagcccgggggcctttgtctctcttgaagagctggaatcgcttccatcaagatccggcgattcctgtgctccagaattgcagtgagcagcccagtgcctttcctcctttgtgcctcacctcatactgtgtttccatttgaactgaccattttctgtcccctgctgtcaagaaaatacccacccccccaaccctgccttcctttctgtccagactactgaaggcagtagcattttatctctacctatttgtggcagttactacacagtgttttgcatagagcactcagtcaattttttaaagagtttttttgtttgtgttttttttgtttgtttgagatggagtttcgctcttgtctcccaggctggagtgcactggcgcgatctcggctcactgcaacacccacctcttgggtccaagtgattctcctgcctcagcctcctgagtagctgggattacaggcacctgccaccacgcccggctaatttttttgtatttttgatagacggggtttcaccatgttgggtaggctggtctcgaactcctgatctcaagtgatccacctgcctcggcctcccaaagttctgggattacaggcgtgagccactgcacctggccaatttttttatagttttactgagatataatttacatacatacaactcacccattgcaagtacataattcagtagatttagtgtgttctcagagttgtgcagccatcaccatagtcaatttttgaacatttttgtcaccccaaagggaagcccccacctattagcagtcactgccaatcaccccatcctaccccagccccaagcagctgccactcttacttcccaactctggatttggctactctggaatttcatcaagaatggaatcaggctgggcatggtggctcacgcctgtaatcccagcactttgggagaccaaggtgggcagatcgcttgagcccaggagttcgagaccagcctgggcaacatggcaaaaccccatctctacaaaaaaatacaaaaattagccaggtgtagtggcatgtgcatatagtcccagctacttgggaggctaaggcaggaggatcacttgagtctgggaggtggaggttgcagtgagctgagatcctgacactgcactccagcctgagcaacagaatgagaccctgtctcaaaaataaaaaaagaatagaatcatacaagacgtggtctgttgagaccggcttctttcatttaatgtaatgtttttatatactttacatagtgtagctttacataatgtcacgtgtcagaacttcgttcctttttattggccagttggttaatactttttgagtggatattttatacacttcaatttttcccttcttaaggtcgtagagtatcagaattatgcctttaaaagtatatacagttttaaaaggtatttatgttatatattttggtatatttcttattgcaaaattgatgttgcttgtgctataaacagtacagaagtatgtaaagtaaaagtaaaatcaaaactccttccagccactgagagcttttttttttttttttttttttttttttttttttttttggagacagagtcttgctctgtcacccaggctggagtgcagtggcgcgatctcgccttactgcaacctccgcctctggggttcaagcttttcttgtgccttagcctcccgagtacctgggaactacaggcactcaccaccacatgtgaccgattttttttgtatgtttagtagagacggggtttcaccattttggccaggctggcctcaaactcctgacctcacgtgatccacctgcctcggcctccctgagtgctgggattataggcgtgagccgctgcgcccagcttcaatgaggtctttaaaaaatctttgttccagccgggcgtggtggctcacgcctgtaatcccagcactttgggaggctgaggcgggcggatcacgaggtcaggagatcaagaccttcctggctaacatggtgaaaccccatctctactaaaaatacaaaaaattagccgagcgtggtagcgggcacctgtagtcccagctactcgggaggctgaggcaggaggatggtgtgaacctgggatgtggagcttgcagtgagccgagatcgcaccactgcactccagcctggtgacagagcgagactccgtctcaaaaaaaaaaaaaattctttgttcctacaaattgccttagtaaacatacttgtacatacgttcttaaatttcttactggtgtttctgttgaacatactctaaaagtagaattatttggtcaaaggacatatacaattaaatttggctgatgagaccaaattgctcacctccctacaattgtcccacaggtcgttgctctgctgttcccacttcccatgccctagccaactctgtagtttatatttcttgttcgtttgtttgttttgagtttttcttttccttttttttttttttgagatggagtcttgctctcgcccaggctggagtgcagtggcgtgatctcggctcactgtaagctccgcctcccgggctcaagcaattctcctgcctcagcctcctgagtagctgggactacaggtgcacgccaccatgcccggctaattttttgtattttttttagtagagatggggtttcaccatgctagtcaggctggtctcgaactcttgacctcgtgatgcgcctgccacctcagcctcccaaagtgctgggattacaggcgtgagccaccgtgctgggtcttgtttttctttttttgagacagggtctcgctgtgttgcgcaggctagagtgcagcaatacaatcacatagctcattgcagcctcaacctcctgggctcaagagttcctcccaccttagcttccagagcggctagaactagaggcacgcacaaccacacctgactaatttttttgttttagttttttgtagagatggggtctcgctgtgttgcgcaggctggtcttgaactcctaggctcaagtgatctgcctgcctcagcctcccaaagtgctgggattacaggtgtgagtccccaaacctggtcaagtttatatttctttttttttttttttttttttgagacagagtctcgctctgtcacccaggctggagtgcagtggcgtgatcttagcccactgcaacctccacctcctggattcaagcaattcttctgcctcagccacccaagtagctgggattataggcgcccgccaccacgcctggctagtttttgtatttttagtagagacagagtttcaccacattggccaggctggtcttgaactcctgaccttgtgatctgcccaccttggcctcctaaagtgctgggattacaggcgtgagccactgcatctggccatatttaattattaatgaaattgggtattatttttgtgtttgttagccatttgtatttcttctgtgagttttttgttcatattctctgcctgtttttctattaggttataggtttttaggcttatggtaccacttcataatacagtaatgtcaatcctttgtctttttgttttgtgtttattatgtctttcaagccgtcatttgtacttcaattaaatgtatagctcttctgtctctatacagacattttaaatttctaaatagcccaacttacccttttattcctttatgacttctgaatttaaaagcacttaccctcctctccaaaataaagctaaaaatacttttctgtctcccatcccaagattataaaaaatatgctcttaaatttactttcagtgttttcacagcataggttttaaatatacatctttaaccagtttggaatttatgttgctgtatggtataagcaagaatacaaccataaatgggcctagttgaccccgtacagttcattgacttcatatgcttcctggtcatatcctaaatcccagtcatttaatggtatcaacccaacactcttctaattattgtacttttatggcatgttttgtttggtaaagcaagtcttaacatcactcttctttctttaaaatattttcttgactcttctctatatttatacttcagtataaatgttagactccattatcaaattccaaaaagaacctttaggatttgtttggaaatgtgttatacacacaaatacacacatacataaagcctcaagtaatgcatgataaaatatatagcagtggttatctctagatgatggtaatattctaggtgatttttttcttgtttttttttctttattttcgaaagtttttacaatatttgtgaagcactttttactttattttattttattttatttttgagataagagtcttgctctgtcacccaggctggagtacagtggcacgatctcggctcactgcaacctccgcctcccagtttcatgcagttctcatgcctcagcctcccgagtagctgggactacaggcacgtgccagcatgcccagctattttttgtatttttagtagagacggggttttgccgtgttggccaggctggttttgaactcctggcctcaagggatccgcccacctcggcctcccaaagtgctgggtttacaggcgtgagccaccgcacccggctgtgaaatcactcccggctgtgaagcactttttaaattgcggaaaactcctgaaaaaaatgttcttaaactaaattatatccttcagtaacttcatgattatctacttaacataacagaagcccaattagaataaagactatttcatgggaaataaataagtgacttgtagagactgaagaagagttacctggctcagaatataaactagaattgtctggaatattcctgggaaggatccagctggaatcaagatactgaagcaacaccaccccataaccttttctgtagcttggttgatgtcagttctgctgagactttagggtctgtagccttttcacttagcagcattcctgggttgttttctctgcagctgtatttacaaggtacccagcctcctagctttccccgttgaagagattcttactcatgtgacacagccagagtttggggtgcaccaaggccgcgtggtctaaatcgggcccctcagtgtcctggtcttttagtcagcatttagcagaaggaagattgctaggtctattcttaactctttgatatatttaagaagcactgtgctcattcttgactcagagcatctagattctttcttttctttttcttgccctgtcttatggtgccaagcatctagattttttttttttttttttttttttttttgcctgttttaagatggaatctcagctgggtgtggtggctcacacctgtaatctcaacattttaggaggccgaggcaggaggatcccttgaggccaggagttcaagaccagcctgggcaacatagttagaccgcacctctaaaaaagaaaaagaaaagagaaatacaaaaattagccaggcatggtggtacacatctgtaatcccagctacttaagaggctgcagcaggaagatcacatgaggtcaggaggtcgaggccacagtgagcctgatcaaaccattgcactccccccagacaatagagggagaccctgtctcaaattaatagaaagagagagagaggagaagggtaggaggcaaggagggagggagggagggaggaaggaagaaaagaaggaaagaaaagaaacgagagagagagagagaaagaaaagaaaagaaaggaaagagagaaaaaggccaggcgcggtgactcaggcctgtaatcccaacactttgggaggccgaggcgggcggatcacaaggtcaggagatctagaccattctggctaacacggtgaagccctgtctctactaaaaatataaaaaattagctgggcgtggtagcaggcgcctgtagtcccaggtactcggaaggctgaggcaggagaatggcacgaacctgggaggcggaggttgcagtgagctgagatcgcgccactgcactccagcctgggtgacagagcgagactcacgtctcagaaaaaaaaaaaaaaaaaaaaaagatagatggggtctcactaccttgcccaggctggactcaaactcctgggctcaagcgattcccccaccctcagcctcccaagtagctgggattacaggcatgcaccactgtacgcagctccctttttgctttttaatctgtatgctcttgctgggtgatcttacccatttagtaacagttagaacacctaatatttgtcaagcactttatatgactatctcattaaatccttaaaacagccctataaggtagggcacaggagctcacgactgtaagcactttgggaggccgaggcagaggcgggattacttgagcctgggcgttcaagacaagcgtaggcaatatagactcccatctctccaaaaaattaaaatttaaaacattggcctgacatggttattattgcctcattttacagatgaggaaactgagactcagacaagtcaaggtcagatgaactgatcggcagaactgaccttgaaacccaggcagcctaactccagagcctatgttcttaactagactttatattccatttttaattttcctcctttctttcctaaaacctgctgtctccttcgttcttggtcttatttgtccaatatccccagctagaattgtcagaaatgattctccagttctccctcacttgacacctcctccttttagtcctgccttttgaagaggctcagacctgtgtgttcctttccacgtccctggccctcccttgcatcagccttgcctaacccccacctgggctgcgagcaggagctgcccttggtggactcttccttctgctcagtctgagaaagtggcgatgctcatgtcactgtaccatttaaaactgcgtggactccttttttgtggttgtggtttggtttctaggcagatcacgctggaacgtcctcacttcacgtgctcagtctggccctcgcgtgtgttttcagctccatttcctgtcattctccacccactccctgtgccttacattcctgccatcctgaggcttcccttttcgcaagatctgggccaggcctgtcccagccccacgcatcagcctttgttcttctgcgctaagcctcctttgtctttggtctcccagacggactctagtcagctctgaagatccagaccccacgcctctttagtagcatttcctcagactcctcagggtgagcagacactcttagggctgccacagcacatgctcaagcctcagctgcggcctcactctgctgggtggtcgtttatctgtttacatgcttgtctccattaacctaaatgtgtcttcaggacaaggaccaaatcccatcagctttcaccacccagcacagagtagcgctcaataaaggttggttaaaatgcttgaaggaatgtgaaagaggctgttaaaaacaacaggaagttagaaatatacttacttctaagcaaagggattatcttgtgtttctcaaagtaatctcttcagctaaattagcaggcctcaggtgggtaggctaatgtaccggatgaaagcgatacacggcaaatggagaagtcctttaaattctaagttcccttagggcgagggtcgctccacaaggttaggatcctctctgagatcaccatgcccctctctcctgctctcatgcacgttcatgagcctgtgacttggtggagagaacattctgtttacagtgagaggccaggactgaagtcacagctctgcaaaaatgatcagctttcggcctagaaccagtgactaactttttgggcctcactttcatgaagacgcatttgatatttgcttttacacttttcttatggttaattttgatgcagagagacttcacatacagagtgcctttgtcatttattgatgaaaaataattcttagctcagtgcaaatgggattgttgtatctgaaatccatctctcctttccctttcagcttcaggatgagttagagaaaggtgaacgggacaatgcagaactgcaggagtttgccaacgccattcttcagcagatagcagaccattgtcccgacatcctagagcaagtggtcaacgccctggaagagtcctcttgaccctgctttatggggaagcctgaggtagtcaacccaggagccaagaaaagagaactacgaggaacaggtgcccggaaccttcttggcaccaaacactacaaacttcatcccaacttgctcacttgaagaagtgtgattccagcaccgtttctacatctgccatcttactctgcctttctgctttggatgtggtctctacactaaccttcttgatgtccagggtagataaagggtcgaatctctctgaagaactgccacctggtcatcagcagtggagaactgtgggagctggtggctctgccctgacagagagccatggagcagaggagcctctcacctcctgtcctctgacatgagaatgaaaccaggaatggacttggagttcaacaggctgagaggatgcctccaatggaccagagagctgagtgttctaatatcacaataggtgctttctcctaaaagggcaaaaaacaatctcaaaaagattagaaaaagagaaggggggaagggaagagaaaatcgactcttctttttactgtctcttctgcttactttccacatgagatgctttgtaccggggagctgtgagcaggcctcacgatggcttgggagcactcgttctcccaaggtctgagtcttcatccagccctgcctgtctgtcgcagccttcctcactctgttcctcggccagttaacaagaagatggtgtgaggtgttctccaccagtctctcctgtttgagactgttgacgttatcatactgaggtgttagatcaaatatctctaattgaagaacatgtgaggttgaaagagcaccagccagggcaacatagcgtgaccctgtctctacaaaaaattaaaaagagaacatacaaagttgacatatgagaccctgttgtccccgcctgcagctttgccccagtaacagatgcccgttgctcttgggctggtttcccctgaacacctccaagaggctgcctgccttgccagcacccgtgtcctgagctcctgcagcccagtggctgctgaagttgtgatccctcactcaccctgctagctttgcccttgactcgtcttctctgaacctcagcctcgtgcattgcctggaaccttcttctagcataaatgaaggtttttcctcctacacacattccttcctcggttatttcattcagagaatatttatgaaatgcctactgtgtgcaagtcatccatccttgaaaaggccacttctcagtgagggagagatgtagtggattctgtgagacatacctgctggagttgaagcagtaaatagcatgtccttcccctccccgatcttaaggtgtgttttctagaaaagttccctaatggaattcatgagtttgggggtctcagtcacccgcttgcctgtaggattccatttgatgattctggatttttgctgtttgttattgcccttagaggggctctgagtatctacttgtgggtggccatttcctgacatctgcatgtacctcgtggaattcagccagcttcatgttgcaaatcagaaagctgaccccaagactgcaaatcaatgaaggtattggcattgttaaggacgtagcgtagacaacagcagtcataaataattaggcaggaacttaacccaaatctagttctttgaccacctctaccaccagaacccagcagacactcacatctcctgataagagttgctggactcgatgtttttgttttgcattttctcctctccttccccacttactcagagaatttaaagtctgtagagtcagcacagccccatcagtccaggaacttcccaccaccagcccttgactgtcccattaactgacatggtcagatttccagctccccctactccctgctgtgaaacaatccctctccctgtgagaggaaactgtggagcgtttcttatcgaaggttaaatggactctgctcataaacctcttactgagatgcttcctgatagccaggctggccagagaggggtgcaggggttagatagtaagtggtggtcgtttgtggtcagttacctcaattctgttcattgcagtgcccgtaaaccatgtagaaagctcccagcactgaaaggcaggagtgttagcatctcgctttatccaccataacgtaaagaactgcggtgtgataacagccttcacggggccacggtggaaccaagacagcaggcgaggccatgcctaaacaagtggtctggcacgggcactggccagctgctctctccaagcaggtggcccagatcccacccacgtggactttctcatcaggtgcagcgcctgccactctcagccactgggtgtgtcactctcctcttcatctcagcattctccatcacttcccctccagaaaaacggatggaaggaagccctctgtgacactgcttctgagaagaagcatttccgggaccgatatcatctgtctggtctctgtgaacagcaaggaatcttcttgaccgttcttgggcactggaggctggctaggagttcagtaataaacgtggccttcgtgctgtagggcagagtggatgcagtttgtagctttcagagtgtctcattgagtctagatcattgaaccaacacttaaccaaatgtcccactcccatcacactaggacttgtcattccatgcccctctcctagtggtcatggtttcatatgggcatacaactgctactgaagttatatagccttgaaaactcagtgcaggttgcccttaattttccccaaacccctccatcggcaagtctagttgccctttagcacctaaagatctgcaccccaaaccaatgtcaccataaagagggcacgaagaagagtgggtgtgatcccaacggggttttgtaactgaagaagcccagtgtgagcttctcatcttttcatatacctctaacccccggtactcattgaatcattgatgaggtatctcaattgagatttgcaaggactttgataccatttgaaatggaaaaattttgaacgggctttaacatgtttaagaaatatggatggggccggccacagtggctcacgcctgtaatcccagaactctggaaggctgaggcaggcggatcacctgagatcaggagttcgaggccagcctggccaagatggcaaaaaccccgactctactaaaaatacaaaattagccaggcgtggtggcgtacgcctgtaatcccagctactcaggaggcaggagaatcgcttgagcctgggaggcagaggctgcggtgagccgagatcgtgtcactgcactccagcctgggtgacagagactccatttaaaaaaaaaaaaaaaaaatatatatatatatatatatatatatatatggatgggaatcaccaaattcatctcagctctaaccttttaacctttgtccttgcactttacaatctaaagatctacctgtggctctcagacttcctcacacttgggttttagaaataacttgtaaagcagactggacccaaggccgccttcagtgtcaagaagggcattgtgacttgcccctcaatttctgtccattgaagtctggttttccatgaggaacttgcgggctcacccacccccagagtgagagaagaggaaggcgaagtcatcacagacacggtcttagccacctgctgaactaatccctccgctattgagggtcagggttgtgaggcaaccatcatgtgtcaccccaaaatataaatgtttctgagccgcccatccactggcatttggatttgctgccagagtcctgttcctcccagaaccatcccgccctcctgttgaccatgttacttgagtgtaggcccggtgtcaagaccctcagagtctttgaggaaagagccaagcagagaagaccgctgcgtggagtgtgacaccacatggcatttctcaagcccagcggaccctgtgtcagcaaataccagtaatttaacatctgctcctggcctcctcttcacctgcctgggttcggaactgaggaggaaggatgagaagagactgcaatgcagcaggcaccctctgcagagtgaggccgcccgtccatcactgccagccctgggctgctcaggaggggacgtgaaccactcaaaggaatgtcttaaagaggatctggagtttcccccatgcaaattagggaagaattaggcaagaaaagacatacattacagggaaatccttctgaacaaaatggctgtcttcacctactcttcttgcaagaaaagacatacattacagggaaatccttctgaacaaaatggctatcttcacctactcttcagcaaaaaccgtctccagactttttagtgtcaaaaatgtaaccaactgtctcctgattttttccaatgtgtttggcaagtgctgtggccctgttgtaggtacttctcctgactcttgggggagaagtggttttagggattgatttgggggagcgggtttttgtcccatcccacctcctctcttctttctctgcttgtcgatattgtctgtgtgattcagagaattggggcagttacattgtgtctgttgttgagattattaaaagattaaaacgtagttgtagaaatgaaaaattaaacagctgtgttttaaaaatgcaaaccaatatcttgttaataaaggaattcaagctatggggcagccacactcccctcctcccaggctggcataggtggccctgggctggcggcttaggaagcatggagcacacttagggtagtgcctgcctgggcaagagacacctgccgagcaaaaggaacgagaatctggggctcagagcctcgcagttgtgccaggattttcctatacatgttcaggacctctgggtagaggtttcacagtttgtgaccccataaccaccctcacccgacgtgggttctagctcagtgtgcctaatactgcatggtaacctgggcttgaccctgaagcccctgcctggcaggccacaggacctctcctgcccacttggtgctatctcttccagtgaccacccagcacgggtgagcactggccagcctggagcctgcaatccaggtggaacagactgtcctccatgtcagttccttctggcttcaggccctcaattatttccctttgagcttttttagaccctagatctcctaggcccaggctctctcttgaccccagagaagccactgtcaggaaaggaagtgaaccctactgaagccagagaattcaccccggccaaagcaggccctctgggtccagcccctcattccacaccacgccagtattgcatccatctactgcagctacacatcctgagggcagcaccacccactctggcctgctggcccatcgcaggactagcccaggcacctgccgggcattgcaggatatccagtggggcctgtgactgctccctgatgcgtcagaagagaagtgttgcactttagtggaggagctgaggagcacctgcccccttgtagcttgagttccttttggtaacagtagcagcctccatggtggtgtctgggatgcacgtgcacccgctgccttcagctgtatgtgtgtgttcctgctggagttgtgttactgacaggataatgacattacaaagaaattgtgttatattcaactttgccttgataattattgtaaacactttgttcattttttcttttttattcacaaactaaatccaccaggaaattataaagttatttaaaaaccgt

SEQ ID NO: 2 - DNA, 5789 bp, homo sapiens
agcagtagcggcagccctgaggacgatatggtgtaagatacttcttcaagattggacagctggggaccttcttctgattaaccttaaaccaacttgtagccatagagacacctcacaaggttcccatttttgttgttgttgttgttgattttctgctcacacctttcctgaccttgcaaccatgtatggaagtgcccgctctgttgggaaggtggagccgagcagccagagccctgggcgttcacccaggcttccacgttcccctcgcttgggtcaccgtcgaaccaacagtacgggagggagttcgggaagcagtgttggaggtggcagtgggaaaaccctttcaatggaaaatatacaatctttaaatgctgcctatgccacctctggccctatgtatctaagtgaccatgaaaatgtgggttcagaaacacctaaaagcaccatgacacttggccgttctgggggacgtctgccttacggtgttcggatgactgctatgggtagtagccccaatatagctagcagtggggttgctagtgacaccatagcatttggagagcatcacctccctcctgtgagtatggcatccactgtacctcactcccttcgtcaggcgagagataacacaatcatggatctgcagacacagctgaaggaagtattaagagaaaatgatctcttgcggaaggatgtggaagtaaaggagagcaaattgagttcttcaatgaatagcatcaagaccttctggagcccagagctgaagaaggaacgagccctgagaaaagatgaagcttccaaaatcaccatttggaaggaacagtacagagttgtacaggaggaaaaccagcacatgcagatgacaatccaggctctccaggatgaattgcggatccagagggacctgaatcagctgtttcagcaggatagtagcagcaggactggcgaaccttgtgtagcagagctgacagaggagaactttcagaggcttcatgctgagcatgagcggcaggccaaagagctgtttcttcttcgaaagacattggaggaaatggagctgcgtattgagactcaaaagcagaccctaaatgctcgggatgaatccattaagaagcttctggaaatgttgcagagcaaaggactttctgccaaggctaccgaggaagaccatgagagaacaagacgactggcagaggcagagatgcacgttcatcacctagaaagccttttggagcagaaggaaaaagagaacagtatgttgagagaggagatgcatcgaaggtttgagaatgctcctgattctgccaaaacaaaagctctgcaaactgttattgagatgaaggattcaaaaatttcctctatggagcgtgggcttcgagacctggaagaggaaattcagatgctgaaatcgaatggtgctttgagtactgaggaaagggaagaagaaatgaagcaaatggaagtgtatcggagccattctaaatttatgaaaaataaggtagaacaactgaaggaggaactaagttcgaaagaggctcaatgggaggagctgaaaaagaaagcggctggtcttcaggctgagattggccaggtgaaacaggagctgtccagaaaggacacagaactactcgccctgcagacaaagctagaaacactcacaaaccagttctcagatagtaaacagcacattgaagtgttgaaggagtccttgactgctaaggagcagagggctgccatcctgcagactgaggtggatgctctccgattgcgtttggaagagaaggaaaccatgttgaataaaaagacaaaacaaattcaggatatggctgaagagaaggggacacaagctggagagatacatgacctcaaggacatgttggatgtgaaggagcggaaggttaatgttcttcagaagaagattgaaaatcttcaagagcagcttagagacaaggaaaagcagatgagcagcttgaaagaacgggtcaaatccttgcaggctgacaccaccaacactgacactgccttgacaactttggaggaggcccttgcagagaaagagcggacaattgaacgcttaaaggagcagagggacagagatgagcgagagaagcaagaggaaattgataactacaaaaaagatcttaaagacttgaaggaaaaagtcagcctgttgcaaggcgacctttcagagaaagaggcttcacttttggatctgaaagagcatgcttcttctctggcatcctcaggactgaaaaaggactcacggcttaagacactagagattgctttggagcagaagaaggaggagtgtctgaaaatggaatcacaattgaaaaaggcacatgaggcagcattggaagccagagccagtccagagatgagtgaccgaatacagcacttggagagagagatcaccaggtacaaagatgaatctagcaaggcccaggcagaagttgatcgactcttagaaatcttgaaggaggtggaaaatgagaagaatgacaaagataagaagatagctgagttggaaaggcaagtgaaagaccagaataagaaggtagcaaatctgaagcacaaggaacaggtggaaaaaaagaagagtgcacaaatgttagaggaggcgcgacgacgggaggacaatctcaacgacagctctcagcagctacaggacagtctccgtaagaaggatgacaggattgaagagctggaagaagcactaagagaaagtgtacagataactgcagagcgggaaatggtgctagcacaagaggaatcagccaggaccaatgctgaaaaacaggtggaggagttactgatggccatggagaaggtaaagcaggaactagaatccatgaaagcaaagctgtcctccacccagcagtctctggcagaaaaggaaactcacttgactaatcttcgggcagagagaaggaaacacttagaggaagttctggagatgaagcaagaagctcttctggctgccattagtgaaaaagacgccaatatagctctcttggagctttcgtcctctaagaagaagacccaagaggaagtggctgccctgaagcgggagaaggatcgtctggtacagcagcttaagcagcagacgcaaaatcgaatgaagctaatggccgacaactacgaggatgaccacttcaaatcctcccattccaatcaaacaaatcacaagccctccccagaccagatcatccagcccctcttagaacttgaccaaaatagaagtaaattaaagttgtacattggacacctgacaaccctctgccatgaccgagaccccctgatcctccgtggactcactccaccagcttcctataacttggacgatgaccaggcggcttgggagaatgagctgcagaagatgacccgggggcagcttcaggatgagttagagaaaggtgaacgggacaatgcagaactgcaggagtttgccaacgccattcttcagcagatagcagaccattgtcccgacatcctagagcaagtggtcaacgccctggaagagtcctcttgaccctgctttatggggaagcctgaggtagtcaacccaggagccaagaaaagagaactacgaggaacaggtgcccggaaccttcttggcaccaaacactacaaacttcatcccaacttgctcacttgaagaagtgtgattccagcaccgtttctacatctgccatcttactctgcctttctgctttggatgtggtctctacactaaccttcttgatgtccagggtagataaagggtcgaatctctctgaagaactgccacctggtcatcagcagtggagaactgtgggagctggtggctctgccctgacagagagccatggagcagaggagcctctcacctcctgtcctctgacatgagaatgaaaccaggaatggacttggagttcaacaggctgagaggatgcctccaatggaccagagagctgagtgttctaatatcacaataggtgctttctcctaaaagggcaaaaaacaatctcaaaaagattagaaaaagagaaggggggaagggaagagaaaatcgactcttctttttactgtctcttctgcttactttccacatgagatgctttgtaccggggagctgtgagcaggcctcacgatggcttgggagcactcgttctcccaaggtctgagtcttcatccagccctgcctgtctgtcgcagccttcctcactctgttcctcggccagttaacaagaagatggtgtgaggtgttctccaccagtctctcctgtttgagactgttgacgttatcatactgaggtgttagatcaaatatctctaattgaagaacatgtgaggttgaaagagcaccagccagggcaacatagcgtgaccctgtctctacaaaaaattaaaaagagaacatacaaagttgacatatgagaccctgttgtccccgcctgcagctttgccccagtaacagatgcccgttgctcttgggctggtttcccctgaacacctccaagaggctgcctgccttgccagcacccgtgtcctgagctcctgcagcccagtggctgctgaagttgtgatccctcactcaccctgctagctttgcccttgactcgtcttctctgaacctcagcctcgtgcattgcctggaaccttcttctagcataaatgaaggtttttcctcctacacacattccttcctcggttatttcattcagagaatatttatgaaatgcctactgtgtgcaagtcatccatccttgaaaaggccacttctcagtgagggagagatgtagtggattctgtgagacatacctgctggagttgaagcagtaaatagcatgtccttcccctccccgatcttaaggtgtgttttctagaaaagttccctaatggaattcatgagtttgggggtctcagtcacccgcttgcctgtaggattccatttgatgattctggatttttgctgtttgttattgcccttagaggggctctgagtatctacttgtgggtggccatttcctgacatctgcatgtacctcgtggaattcagccagcttcatgttgcaaatcagaaagctgaccccaagactgcaaatcaatgaaggtattggcattgttaaggacgtagcgtagacaacagcagtcataaataattaggcaggaacttaacccaaatctagttctttgaccacctctaccaccagaacccagcagacactcacatctcctgataagagttgctggactcgatgtttttgttttgcattttctcctctccttccccacttactcagagaatttaaagtctgtagagtcagcacagccccatcagtccaggaacttcccaccaccagcccttgactgtcccattaactgacatggtcagatttccagctccccctactccctgctgtgaaacaatccctctccctgtgagaggaaactgtggagcgtttcttatcgaaggttaaatggactctgctcataaacctcttactgagatgcttcctgatagccaggctggccagagaggggtgcaggggttagatagtaagtggtggtcgtttgtggtcagttacctcaattctgttcattgcagtgcccgtaaaccatgtagaaagctcccagcactgaaaggcaggagtgttagcatctcgctttatccaccataacgtaaagaactgcggtgtgataacagccttcacggggccacggtggaaccaagacagcaggcgaggccatgcctaaacaagtggtctggcacgggcactggccagctgctctctccaagcaggtgg

SEQ ID NO: 3 - DNA, 5796 bp, homo sapiens
gattggacagctggggaccttcttctgattaaccttaaaccaacttgtagccatagagacacctcacaaggttcccatttttgttgttgttgttgttgattttctgctcacacctttcctgaccttgcaaccatgtatggaagtgcccgctctgttgggaaggtggagccgagcagccagagccctgggcgttcacccaggcttccacgttcccctcgcttgggtcaccgtcgaaccaacagtacgggagggagttcgggaagcagtgttggaggtggcagtgggaaaaccctttcaatggaaaatatacaatctttaaatgctgcctatgccacctctggccctatgtatctaagtgaccatgaaaatgtgggttcagaaacacctaaaagcaccatgacacttggccgttctgggggacgtctgccttacggtgttcggatgactgctatgggtagtagccccaatatagctagcagtggggttgctagtgacaccatagcatttggagagcatcacctccctcctgtgagtatggcatccactgtacctcactcccttcgtcaggcgagagataacacaatcatggatctgcagacacagctgaaggaagtattaagagaaaatgatctcttgcggaaggatgtggaagtaaaggagagcaaattgagttcttcaatgaatagcatcaagaccttctggagcccagagctgaagaaggaacgagccctgagaaaagatgaagcttccaaaatcaccatttggaaggaacagtacagagttgtacaggaggaaaaccagcacatgcagatgacaatccaggctctccaggatgaattgcggatccagagggacctgaatcagctgtttcagcaggatagtagcagcaggactggcgaaccttgtgtagcagagctgacagaggagaactttcagaggcttcatgctgagcatgagcggcaggccaaagagctgtttcttcttcgaaagacattggaggaaatggagctgcgtattgagactcaaaagcagaccctaaatgctcgggatgaatccattaagaagcttctggaaatgttgcagagcaaaggactttctgccaaggctaccgaggaagaccatgagagaacaagacgactggcagaggcagagatgcacgttcatcacctagaaagccttttggagcagaaggaaaaagagaacagtatgttgagagaggagatgcatcgaaggtttgagaatgctcctgattctgccaaaacaaaagctctgcaaactgttattgagatgaaggattcaaaaatttcctctatggagcgtgggcttcgagacctggaagaggaaattcagatgctgaaatcgaatggtgctttgagtactgaggaaagggaagaagaaatgaagcaaatggaagtgtatcggagccattctaaatttatgaaaaataaggtagaacaactgaaggaggaactaagttcgaaagaggctcaatgggaggagctgaaaaagaaagcggctggtcttcaggctgagattggccaggtgaaacaggagctgtccagaaaggacacagaactactcgccctgcagacaaagctagaaacactcacaaaccagttctcagatagtaaacagcacattgaagtgttgaaggagtccttgactgctaaggagcagagggctgccatcctgcagactgaggtggatgctctccgattgcgtttggaagagaaggaaaccatgttgaataaaaagacaaaacaaattcaggatatggctgaagagaaggggacacaagctggagagatacatgacctcaaggacatgttggatgtgaaggagcggaaggttaatgttcttcagaagaagattgaaaatcttcaagagcagcttagagacaaggaaaagcagatgagcagcttgaaagaacgggtcaaatccttgcaggctgacaccaccaacactgacactgccttgacaactttggaggaggcccttgcagagaaagagcggacaattgaacgcttaaaggagcagagggacagagatgagcgagagaagcaagaggaaattgataactacaaaaaagatcttaaagacttgaaggaaaaagtcagcctgttgcaaggcgacctttcagagaaagaggcttcacttttggatctgaaagagcatgcttcttctctggcatcctcaggactgaaaaaggactcacggcttaagacactagagattgctttggagcagaagaaggaggagtgtctgaaaatggaatcacaattgaaaaaggcacatgaggcagcattggaagccagagccagtccagagatgagtgaccgaatacagcacttggagagagagatcaccaggtacaaagatgaatctagcaaggcccaggcagaagttgatcgactcttagaaatcttgaaggaggtggaaaatgagaagaatgacaaagataagaagatagctgagttggaaaggcaagtgaaagaccagaataagaaggtagcaaatctgaagcacaaggaacaggtggaaaaaaagaagagtgcacaaatgttagaggaggcgcgacgacgggaggacaatctcaacgacagctctcagcagctacaggacagtctccgtaagaaggatgacaggattgaagagctggaagaagcactaagagaaagtgtacagataactgcagagcgggaaatggtgctagcacaagaggaatcagccaggaccaatgctgaaaaacaggtggaggagttactgatggccatggagaaggtaaagcaggaactagaatccatgaaagcaaagctgtcctccacccagcagtctctggcagaaaaggaaactcacttgactaatcttcgggcagagagaaggaaacacttagaggaagttctggagatgaagcaagaagctcttctggctgccattagtgaaaaagacgccaatatagctctcttggagctttcgtcctctaagaagaagacccaagaggaagtggctgccctgaagcgggagaaggatcgtctggtacagcagcttaagcagcagacgcaaaatcgaatgaagctaatggccgacaactacgaggatgaccacttcaaatcctcccattccaatcaaacaaatcacaagccctccccagaccagatcatccagcccctcttagaacttgaccaaaatagaagtaaattaaagttgtacattggacacctgacaaccctctgccatgaccgagaccccctgatcctccgtggactcactccaccagcttcctataacttggacgatgaccaggcggcttgggagaatgagctgcagaagatgacccgggggcagaatccgttgcatcccaaagccatggaaaaactgccttttttcatgtgatgctcatgcttcaggatgagttagagaaaggtgaacgggacaatgcagaactgcaggagtttgccaacgccattcttcagcagatagcagaccattgtcccgacatcctagagcaagtggtcaacgccctggaagagtcctcttgaccctgctttatggggaagcctgaggtagtcaacccaggagccaagaaaagagaactacgaggaacaggtgcccggaaccttcttggcaccaaacactacaaacttcatcccaacttgctcacttgaagaagtgtgattccagcaccgtttctacatctgccatcttactctgcctttctgctttggatgtggtctctacactaaccttcttgatgtccagggtagataaagggtcgaatctctctgaagaactgccacctggtcatcagcagtggagaactgtgggagctggtggctctgccctgacagagagccatggagcagaggagcctctcacctcctgtcctctgacatgagaatgaaaccaggaatggacttggagttcaacaggctgagaggatgcctccaatggaccagagagctgagtgttctaatatcacaataggtgctttctcctaaaagggcaaaaaacaatctcaaaaagattagaaaaagagaaggggggaagggaagagaaaatcgactcttctttttactgtctcttctgcttactttccacatgagatgctttgtaccggggagctgtgagcaggcctcacgatggcttgggagcactcgttctcccaaggtctgagtcttcatccagccctgcctgtctgtcgcagccttcctcactctgttcctcggccagttaacaagaagatggtgtgaggtgttctccaccagtctctcctgtttgagactgttgacgttatcatactgaggtgttagatcaaatatctctaattgaagaacatgtgaggttgaaagagcaccagccagggcaacatagcgtgaccctgtctctacaaaaaattaaaaagagaacatacaaagttgacatatgagaccctgttgtccccgcctgcagctttgccccagtaacagatgcccgttgctcttgggctggtttcccctgaacacctccaagaggctgcctgccttgccagcacccgtgtcctgagctcctgcagcccagtggctgctgaagttgtgatccctcactcaccctgctagctttgcccttgactcgtcttctctgaacctcagcctcgtgcattgcctggaaccttcttctagcataaatgaaggtttttcctcctacacacattccttcctcggttatttcattcagagaatatttatgaaatgcctactgtgtgcaagtcatccatccttgaaaaggccacttctcagtgagggagagatgtagtggattctgtgagacatacctgctggagttgaagcagtaaatagcatgtccttcccctccccgatcttaaggtgtgttttctagaaaagttccctaatggaattcatgagtttgggggtctcagtcacccgcttgcctgtaggattccatttgatgattctggatttttgctgtttgttattgcccttagaggggctctgagtatctacttgtgggtggccatttcctgacatctgcatgtacctcgtggaattcagccagcttcatgttgcaaatcagaaagctgaccccaagactgcaaatcaatgaaggtattggcattgttaaggacgtagcgtagacaacagcagtcataaataattaggcaggaacttaacccaaatctagttctttgaccacctctaccaccagaacccagcagacactcacatctcctgataagagttgctggactcgatgtttttgttttgcattttctcctctccttccccacttactcagagaatttaaagtctgtagagtcagcacagccccatcagtccaggaacttcccaccaccagcccttgactgtcccattaactgacatggtcagatttccagctccccctactccctgctgtgaaacaatccctctccctgtgagaggaaactgtggagcgtttcttatcgaaggttaaatggactctgctcataaacctcttactgagatgcttcctgatagccaggctggccagagaggggtgcaggggttagatagtaagtggtggtcgtttgtggtcagttacctcaattctgttcattgcagtgcccgtaaaccatgtagaaagctcccagcactgaaaggcaggagtgttagcatctcgctttatccaccataacgtaaagaactgcggtgtgataacagccttcacggggccacggtggaaccaagacagcaggcgaggccatgcctaaacaagtggtctggcacgggcactggccagctgctctctccaagcaggtgg

SEQ ID NO: 4 - DNA, 4390 bp, homo sapiens
gggccgtgctgtggcggcggcggcggcggtagtggcggcggcggcggtgcctgggcggcagcagcagcagtagcggcagccctgaggacggtgagacggccgcggcggcggcgacagcgcggaagtcgcgcgggacccagagcttcccccctgtcgctagtgctgaggctttcgcctttcctacccagcttcttgctcacggcccgggctgggctgggcagggcaacgcgcccccggggaggggcggagctgtaggttggtcttgaactcctggcctcaagcgatcttcctaccttggcctcccagagcgctgggattataggcatgagccattgcacttggcactttttttgtttgttttccagttgcatgatatggtgtaagatacttcttcaagattggacagctggggaccttcttctgattaaccttaaaccaacttgtagccatagagacacctcacaaggttcccatttttgttgttgttgttgttgattttctgctcacacctttcctgaccttgcaaccatgtatggaagtgcccgctctgttgggaaggtggagccgagcagccagagccctgggcgttcacccaggcttccacgttcccctcgcttgggtcaccgtcgaaccaacagtacgggagggagttcgggaagcagtgttggaggtggcagtgggaaaaccctttcaatggaaaatatacaatctttaaatgctgcctatgccacctctggccctatgtatctaagtgaccatgaaaatgtgggttcagaaacacctaaaagcaccatgacacttggccgttctgggggacgtctgccttacggtgttcggatgactgctatgggtagtagccccaatatagctagcagtggggttgctagtgacaccatagcatttggagagcatcacctccctcctgtgagtatggcatccactgtacctcactcccttcgtcaggcgagagataacacaatcatggatctgcagacacagctgaaggaagtattaagagaaaatgatctcttgcggaaggatgtggaagtaaaggagagcaaattgagttcttcaatgaatagcatcaagaccttctggagcccagagctgaagaaggaacgagccctgagaaaagatgaagcttccaaaatcaccatttggaaggaacagtacagagttgtacaggaggaaaaccagcacatgcagatgacaatccaggctctccaggatgaattgcggatccagagggacctgaatcagctgtttcagcaggatagtagcagcaggactggcgaaccttgtgtagcagagctgacagaggagaactttcagaggcttcatgctgagcatgagcggcaggccaaagagctgtttcttcttcgaaagacattggaggaaatggagctgcgtattgagactcaaaagcagaccctaaatgctcgggatgaatccattaagaagcttctggaaatgttgcagagcaaaggactttctgccaaggctaccgaggaagaccatgagagaacaagacgactggcagaggcagagatgcacgttcatcacctagaaagccttttggagcagaaggaaaaagagaacagtatgttgagagaggagatgcatcgaaggtttgagaatgctcctgattctgccaaaacaaaagctctgcaaactgttattgagatgaaggattcaaaaatttcctctatggagcgtgggcttcgagacctggaagaggaaattcagatgctgaaatcgaatggtgctttgagtactgaggaaagggaagaagaaatgaagcaaatggaagtgtatcggagccattctaaatttatgaaaaataaggtagaacaactgaaggaggaactaagttcgaaagaggctcaatgggaggagctgaaaaagaaagcggctggtcttcaggctgagattggccaggtgaaacaggagctgtccagaaaggacacagaactactcgccctgcagacaaagctagaaacactcacaaaccagttctcagatagtaaacagcacattgaagtgttgaaggagtccttgactgctaaggagcagagggctgccatcctgcagactgaggtggatgctctccgattgcgtttggaagagaaggaaaccatgttgaataaaaagacaaaacaaattcaggatatggctgaagagaaggggacacaagctggagagatacatgacctcaaggacatgttggatgtgaaggagcggaaggttaatgttcttcagaagaagattgaaaatcttcaagagcagcttagagacaaggaaaagcagatgagcagcttgaaagaacgggtcaaatccttgcaggctgacaccaccaacactgacactgccttgacaactttggaggaggcccttgcagagaaagagcggacaattgaacgcttaaaggagcagagggacagagatgagcgagagaagcaagaggaaattgataactacaaaaaagatcttaaagacttgaaggaaaaagtcagcctgttgcaaggcgacctttcagagaaagaggcttcacttttggatctgaaagagcatgcttcttctctggcatcctcaggactgaaaaaggactcacggcttaagacactagagattgctttggagcagaagaaggaggagtgtctgaaaatggaatcacaattgaaaaaggcacatgaggcagcattggaagccagagccagtccagagatgagtgaccgaatacagcacttggagagagagatcaccaggtacaaagatgaatctagcaaggcccaggcagaagttgatcgactcttagaaatcttgaaggaggtggaaaatgagaagaatgacaaagataagaagatagctgagttggaaagtctcacctcaaggcaagtgaaagaccagaataagaaggtagcaaatctgaagcacaaggaacaggtggaaaaaaagaagagtgcacaaatgttagaggaggcgcgacgacgggaggacaatctcaacgacagctctcagcagctacaggacagtctccgtaagaaggatgacaggattgaagagctggaagaagcactaagagaaagtgtacagataactgcagagcgggaaatggtgctagcacaagaggaatcagccaggaccaatgctgaaaaacaggtggaggagttactgatggccatggagaaggtaaagcaggaactagaatccatgaaagcaaagctgtcctccacccagcagtctctggcagaaaaggaaactcacttgactaatcttcgggcagagagaaggaaacacttagaggaagttctggagatgaagcaagaagctcttctggctgccattagtgaaaaagacgccaatatagctctcttggagctttcgtcctctaagaagaagacccaagaggaagtggctgccctgaagcgggagaaggatcgtctggtacagcagcttaagcagcagacgcaaaatcgaatgaagctaatggccgacaactacgaggatgaccacttcaaatcctcccattccaatcaaacaaatcacaagccctccccagaccagatcatccagcccctcttagaacttgaccaaaatagaagtaaattaaagttgtacattggacacctgacaaccctctgccatgaccgagaccccctgatcctccgtggactcactccaccagcttcctataacttggacgatgaccaggcggcttgggagaatgagctgcagaagatgacccgggggcagcttcaggatgagttagagaaaggtgaacgggacaatgcagaactgcaggagtttgccaacgccattcttcagcagatagcagaccattgtcccgacatcctagagcaagtggtcaacgccctggaagagtcctcttgaccctgctttatggggaagcctgaggtagtcaacccaggagccaagaaaagagaactacgaggaacaggtgcccggaaccttcttggcaccaaacactacaaacttcatcccaacttgctcacttgaagaagtgtgattccagcaccgtttctacatctgccatcttactctgcctttctgctttggatgtggtctctacactaaccttcttgatgtccagggtagataaagggtcgaatctctctgaagaactgccacctggtcatcagcagtggagaactgtgggagctggtggctctgccctgacagagagccatggagcagaggagcctctcacctcctgtcctctgacatgagaatgaaaccaggaatggacttggagttcaacaggctgagaggatgcctccaatggaccagagagctgagtgttctaatatcacaataggtgctttctcctaaaagggcaaaaaacaatctcaaaaagattagaaaaagagaa

SEQ ID NO: 5 - DNA, 9118 bp, homo sapiens
gatatggtgtaagatacttcttcaagattggacagctggggaccttcttctgattaaccttaaaccaacttgtagccatagagacacctcacaaggttcccatttttgttgttgttgttgttgattttctgctcacacctttcctgaccttgcaaccatgtatggaagtgcccgctctgttgggaaggtggagccgagcagccagagccctgggcgttcacccaggcttccacgttcccctcgcttgggtcaccgtcgaaccaacagtacgggagggagttcgggaagcagtgttggaggtggcagtgggaaaaccctttcaatggaaaatatacaatctttaaatgctgcctatgccacctctggccctatgtatctaagtgaccatgaaaatgtgggttcagaaacacctaaaagcaccatgacacttggccgttctgggggacgtctgccttacggtgttcggatgactgctatgggtagtagccccaatatagctagcagtggggttgctagtgacaccatagcatttggagagcatcacctccctcctgtgagtatggcatccactgtacctcactcccttcgtcaggcgagagataacacaatcatggatctgcagacacagctgaaggaagtattaagagaaaatgatctcttgcggaaggatgtggaagtaaaggagagcaaattgagttcttcaatgaatagcatcaagaccttctggagcccagagctgaagaaggaacgagccctgagaaaagatgaagcttccaaaatcaccatttggaaggaacagtacagagttgtacaggaggaaaaccagcacatgcagatgacaatccaggctctccaggatgaattgcggatccagagggacctgaatcagctgtttcagcaggatagtagcagcaggactggcgaaccttgtgtagcagagctgacagaggagaactttcagaggcttcatgctgagcatgagcggcaggccaaagagctgtttcttcttcgaaagacattggaggaaatggagctgcgtattgagactcaaaagcagaccctaaatgctcgggatgaatccattaagaagcttctggaaatgttgcagagcaaaggactttctgccaaggctaccgaggaagaccatgagagaacaagacgactggcagaggcagagatgcacgttcatcacctagaaagccttttggagcagaaggaaaaagagaacagtatgttgagagaggagatgcatcgaaggtttgagaatgctcctgattctgccaaaacaaaagctctgcaaactgttattgagatgaaggattcaaaaatttcctctatggagcgtgggcttcgagacctggaagaggaaattcagatgctgaaatcgaatggtgctttgagtactgaggaaagggaagaagaaatgaagcaaatggaagtgtatcggagccattctaaatttatgaaaaataagattggccaggtgaaacaggagctgtccagaaaggacacagaactactcgccctgcagacaaagctagaaacactcacaaaccagttctcagatagtaaacagcacattgaagtgttgaaggagtccttgactgctaaggagcagagggctgccatcctgcagactgaggtggatgctctccgattgcgtttggaagagaaggaaaccatgttgaataaaaagacaaaacaaattcaggatatggctgaagagaaggggacacaagctggagagatacatgacctcaaggacatgttggatgtgaaggagcggaaggttaatgttcttcagaagaagattgaaaatcttcaagagcagcttagagacaaggaaaagcagatgagcagcttgaaagaacgggtcaaatccttgcaggctgacaccaccaacactgacactgccttgacaactttggaggaggcccttgcagagaaagagcggacaattgaacgcttaaaggagcagagggacagagatgagcgagagaagcaagaggaaattgataactacaaaaaagatcttaaagacttgaaggaaaaagtcagcctgttgcaaggcgacctttcagagaaagaggcttcacttttggatctgaaagagcatgcttcttctctggcatcctcaggactgaaaaaggactcacggcttaagacactagagattgctttggagcagaagaaggaggagtgtctgaaaatggaatcacaattgaaaaaggcacatgaggcagcattggaagccagagccagtccagagatgagtgaccgaatacagcacttggagagagagatcaccaggtacaaagatgaatctagcaaggcccaggcagaagttgatcgactcttagaaatcttgaaggaggtggaaaatgagaagaatgacaaagataagaagatagctgagttggaaaggcaagtgaaagaccagaataagaaggtagcaaatctgaagcacaaggaacaggtggaaaaaaagaagagtgcacaaatgttagaggaggcgcgacgacgggaggacaatctcaacgacagctctcagcagctacaggacagtctccgtaagaaggatgacaggattgaagagctggaagaagcactaagagaaagtgtacagataactgcagagcgggaaatggtgctagcacaagaggaatcagccaggaccaatgctgaaaaacaggtggaggagttactgatggccatggagaaggtaaagcaggaactagaatccatgaaagcaaagctgtcctccacccagcagtctctggcagaaaaggaaactcacttgactaatcttcgggcagagagaaggaaacacttagaggaagttctggagatgaagcaagaagctcttctggctgccattagtgaaaaagacgccaatatagctctcttggagctttcgtcctctaagaagaagacccaagaggaagtggctgccctgaagcgggagaaggatcgtctggtacagcagcttaagcagcagacgcaaaatcgaatgaagctaatggccgacaactacgaggatgaccacttcaaatcctcccattccaatcaaacaaatcacaagccctccccagaccagatcatccagcccctcttagaacttgaccaaaatagaagtaaattaaagttgtacattggacacctgacaaccctctgccatgaccgagaccccctgatcctccgtggactcactccaccagcttcctataacttggacgatgaccaggcggcttgggagaatgagctgcagaagatgacccgggggcagcttcaggatgagttagagaaaggtgaacgggacaatgcagaactgcaggagtttgccaacgccattcttcagcagatagcagaccattgtcccgacatcctagagcaagtggtcaacgccctggaagagtcctcttgaccctgctttatggggaagcctgaggtagtcaacccaggagccaagaaaagagaactacgaggaacaggtgcccggaaccttcttggcaccaaacactacaaacttcatcccaacttgctcacttgaagaagtgtgattccagcaccgtttctacatctgccatcttactctgcctttctgctttggatgtggtctctacactaaccttcttgatgtccagggtagataaagggtcgaatctctctgaagaactgccacctggtcatcagcagtggagaactgtgggagctggtggctctgccctgacagagagccatggagcagaggagcctctcacctcctgtcctctgacatgagaatgaaaccaggaatggacttggagttcaacaggctgagaggatgcctccaatggaccagagagctgagtgttctaatatcacaataggtgctttctcctaaaagggcaaaaaacaatctcaaaaagattagaaaaagagaaggggggaagggaagagaaaatcgactcttctttttactgtctcttctgcttactttccacatgagatgctttgtaccggggagctgtgagcaggcctcacgatggcttgggagcactcgttctcccaaggtctgagtcttcatccagccctgcctgtctgtcgcagccttcctcactctgttcctcggccagttaacaagaagatggtgtgaggtgttctccaccagtctctcctgtttgagactgttgacgttatcatactgaggtgttagatcaaatatctctaattgaagaacatgtgaggttgaaagagcaccagccagggcaacatagcgtgaccctgtctctacaaaaaattaaaaagagaacatacaaagttgacatatgagaccctgttgtccccgcctgcagctttgccccagtaacagatgcccgttgctcttgggctggtttcccctgaacacctccaagaggctgcctgccttgccagcacccgtgtcctgagctcctgcagcccagtggctgctgaagttgtgatccctcactcaccctgctagctttgcccttgactcgtcttctctgaacctcagcctcgtgcattgcctggaaccttcttctagcataaatgaaggtttttcctcctacacacattccttcctcggttatttcattcagagaatatttatgaaatgcctactgtgtgcaagtcatccatccttgaaaaggccacttctcagtgagggagagatgtagtggattctgtgagacatacctgctggagttgaagcagtaaatagcatgtccttcccctccccgatcttaaggtgtgttttctagaaaagttccctaatggaattcatgagtttgggggtctcagtcacccgcttgcctgtaggattccatttgatgattctggatttttgctgtttgttattgcccttagaggggctctgagtatctacttgtgggtggccatttcctgacatctgcatgtacctcgtggaattcagccagcttcatgttgcaaatcagaaagctgaccccaagactgcaaatcaatgaaggtattggcattgttaaggacgtagcgtagacaacagcagtcataaataattaggcaggaacttaacccaaatctagttctttgaccacctctaccaccagaacccagcagacactcacatctcctgataagagttgctggactcgatgtttttgttttgcattttctcctctccttccccacttactcagagaatttaaagtctgtagagtcagcacagccccatcagtccaggaacttcccaccaccagcccttgactgtcccattaactgacatggtcagatttccagctccccctactccctgctgtgaaacaatccctctccctgtgagaggaaactgtggagcgtttcttatcgaaggttaaatggactctgctcataaacctcttactgagatgcttcctgatagccaggctggccagagaggggtgcaggggttagatagtaagtggtggtcgtttgtggtcagttacctcaattctgttcattgcagtgcccgtaaaccatgtagaaagctcccagcactgaaaggcaggagtgttagcatctcgctttatccaccataacgtaaagaactgcggtgtgataacagccttcacggggccacggtggaaccaagacagcaggcgaggccatgcctaaacaagtggtctggcacgggcactggccagctgctctctccaagcaggtggcccagatcccacccacgtggactttctcatcaggtgcagcgcctgccactctcagccactgggtgtgtcactctcctcttcatctcagcattctccatcacttcccctccagaaaaacggatggaaggaagccctctgtgacactgcttctgagaagaagcatttccgggaccgatatcatctgtctggtctctgtgaacagcaaggaatcttcttgaccgttcttgggcactggaggctggctaggagttcagtaataaacgtggccttcgtgctgtagggcagagtggatgcagtttgtagctttcagagtgtctcattgagtctagatcattgaaccaacacttaaccaaatgtcccactcccatcacactaggacttgtcattccatgcccctctcctagtggtcatggtttcatatgggcatacaactgctactgaagttatatagccttgaaaactcagtgcaggttgcccttaattttccccaaacccctccatcggcaagtctagttgccctttagcacctaaagatctgcaccccaaaccaatgtcaccataaagagggcacgaagaagagtgggtgtgatcccaacggggttttgtaactgaagaagcccagtgtgagcttctcatcttttcatatacctctaacccccggtactcattgaatcattgatgaggtatctcaattgagatttgcaaggactttgataccatttgaaatggaaaaattttgaacgggctttaacatgtttaagaaatatggatggggccggccacagtggctcacgcctgtaatcccagaactctggaaggctgaggcaggcggatcacctgagatcaggagttcgaggccagcctggccaagatggcaaaaaccccgactctactaaaaatacaaaattagccaggcgtggtggcgtacgcctgtaatcccagctactcaggaggcaggagaatcgcttgagcctgggaggcagaggctgcggtgagccgagatcgtgtcactgcactccagcctgggtgacagagactccatttaaaaaaaaaaaaaaaaaatatatatatatatatatatatatatatatggatgggaatcaccaaattcatctcagctctaaccttttaacctttgtccttgcactttacaatctaaagatctacctgtggctctcagacttcctcacacttgggttttagaaataacttgtaaagcagactggacccaaggccgccttcagtgtcaagaagggcattgtgacttgcccctcaatttctgtccattgaagtctggttttccatgaggaacttgcgggctcacccacccccagagtgagagaagaggaaggcgaagtcatcacagacacggtcttagccacctgctgaactaatccctccgctattgagggtcagggttgtgaggcaaccatcatgtgtcaccccaaaatataaatgtttctgagccgcccatccactggcatttggatttgctgccagagtcctgttcctcccagaaccatcccgccctcctgttgaccatgttacttgagtgtaggcccggtgtcaagaccctcagagtctttgaggaaagagccaagcagagaagaccgctgcgtggagtgtgacaccacatggcatttctcaagcccagcggaccctgtgtcagcaaataccagtaatttaacatctgctcctggcctcctcttcacctgcctgggttcggaactgaggaggaaggatgagaagagactgcaatgcagcaggcaccctctgcagagtgaggccgcccgtccatcactgccagccctgggctgctcaggaggggacgtgaaccactcaaaggaatgtcttaaagaggatctggagtttcccccatgcaaattagggaagaattaggcaagaaaagacatacattacagggaaatccttctgaacaaaatggctgtcttcacctactcttcttgcaagaaaagacatacattacagggaaatccttctgaacaaaatggctatcttcacctactcttcagcaaaaaccgtctccagactttttagtgtcaaaaatgtaaccaactgtctcctgattttttccaatgtgtttggcaagtgctgtggccctgttgtaggtacttctcctgactcttgggggagaagtggttttagggattgatttgggggagcgggtttttgtcccatcccacctcctctcttctttctctgcttgtcgatattgtctgtgtgattcagagaattggggcagttacattgtgtctgttgttgagattattaaaagattaaaacgtagttgtagaaatgaaaaattaaacagctgtgttttaaaaatgcaaaccaatatcttgttaataaaggaattcaagctatggggcagccacactcccctcctcccaggctggcataggtggccctgggctggcggcttaggaagcatggagcacacttagggtagtgcctgcctgggcaagagacacctgccgagcaaaaggaacgagaatctggggctcagagcctcgcagttgtgccaggattttcctatacatgttcaggacctctgggtagaggtttcacagtttgtgaccccataaccaccctcacccgacgtgggttctagctcagtgtgcctaatactgcatggtaacctgggcttgaccctgaagcccctgcctggcaggccacaggacctctcctgcccacttggtgctatctcttccagtgaccacccagcacgggtgagcactggccagcctggagcctgcaatccaggtggaacagactgtcctccatgtcagttccttctggcttcaggccctcaattatttccctttgagcttttttagaccctagatctcctaggcccaggctctctcttgaccccagagaagccactgtcaggaaaggaagtgaaccctactgaagccagagaattcaccccggccaaagcaggccctctgggtccagcccctcattccacaccacgccagtattgcatccatctactgcagctacacatcctgagggcagcaccacccactctggcctgctggcccatcgcaggactagcccaggcacctgccgggcattgcaggatatccagtggggcctgtgactgctccctgatgcgtcagaagagaagtgttgcactttagtggaggagctgaggagcacctgcccccttgtagcttgagttccttttggtaacagtagcagcctccatggtggtgtctgggatgcacgtgcacccgctgccttcagctgtatgtgtgtgttcctgctggagttgtgttactgacaggataatgacattacaaagaaattgtgttatattcaactttgccttgataattattgtaaacactttgttcattttttcttttttattcacaaactaaatccaccaggaaattataaagttattt

SEQ ID NO: 6 - DNA, 550 bp, homo sapiens
accacttcaaatcctcccattccaatcaaacaaatcacaagccctccccagaccagatcatccagcccctcttagaacttgaccaaaatagaagtaaattaaagttgtacattggacacctgacaaccctctgccatgaccgagaccccctgatcctccgtggactcactccaccagcttcctataacttggacgatgaccaggcggcttgggagaatgagctgcagaagatgacccgggggcaggtgagcctctcactcaaactttgaaaagagcctgtgaaaatccagttgctgtgtaggttgatgcagtgggggctaccttggggaatccagttgccgtgtagttgatgcagtgggggctaccttggggaatcccgttgctgtgtaggttcatgcagtgggagctaccttggggaattccatgtttagattcaagatttggggggtggggaggggtttccagatataatttttaaactgatttttaattgattttttactgttttatttttttaattcaccaattaaaaatgtatgtttctcatgta

SEQ ID NO: 7 - DNA, 546 bp, homo sapiens
gtcggaacgtggacactaatttccgcccacgctccccgcgtcctggcgggatcaccacagacacgacgtccattgctggggtcctcggcgatgcccgtgtgcgcagccccgcgagtctcagatatggtgtaagatacttcttcaagattggacagctggggaccttcttctgattaaccttaaaccaacttgtagccatagagacacctcacaaggttcccatttttgttgttgttgttgttgattttctgctcacacctttcctgaccttgcaaccatgtatggaagtgcccgctctgttgggaaggtggagccgagcagccagagccctgggcgttcacccaggcttccacgttcccctcgcttgggtcaccgtcgaaccaacagtacgggagggagttcgggaagcagtgttggaggtggcagtgggaaaaccctttcaatggaaaatatacaatctttaaatgctgcctatgccacctctggccctatgtatctaagtgaccatgaaaatgtgggttcagaaacacctaaaagcaccatgac

SEQ ID NO: 8 - DNA, 9241 bp, homo sapiens
gggcgcggtgacgtcgcgggcgcctgggccgtgctgtggcggcggcggcggcggtagtggcggcggcggcggtgcctgggcggcagcagcagcagtagcggcagccctgaggacgatatggtgtaagatacttcttcaagattggacagctggggaccttcttctgattaaccttaaaccaacttgtagccatagagacacctcacaaggttcccatttttgttgttgttgttgttgattttctgctcacacctttcctgaccttgcaaccatgtatggaagtgcccgctctgttgggaaggtggagccgagcagccagagccctgggcgttcacccaggcttccacgttcccctcgcttgggtcaccgtcgaaccaacagtacgggagggagttcgggaagcagtgttggaggtggcagtgggaaaaccctttcaatggaaaatatacaatctttaaatgctgcctatgccacctctggccctatgtatctaagtgaccatgaaaatgtgggttcagaaacacctaaaagcaccatgacacttggccgttctgggggacgtctgccttacggtgttcggatgactgctatgggtagtagccccaatatagctagcagtggggttgctagtgacaccatagcatttggagagcatcacctccctcctgtgagtatggcatccactgtacctcactcccttcgtcaggcgagagataacacaatcatggatctgcagacacagctgaaggaagtattaagagaaaatgatctcttgcggaaggatgtggaagtaaaggagagcaaattgagttcttcaatgaatagcatcaagaccttctggagcccagagctgaagaaggaacgagccctgagaaaagatgaagcttccaaaatcaccatttggaaggaacagtacagagttgtacaggaggaaaaccagcacatgcagatgacaatccaggctctccaggatgaattgcggatccagagggacctgaatcagctgtttcagcaggatagtagcagcaggactggcgaaccttgtgtagcagagctgacagaggagaactttcagaggcttcatgctgagcatgagcggcaggccaaagagctgtttcttcttcgaaagacattggaggaaatggagctgcgtattgagactcaaaagcagaccctaaatgctcgggatgaatccattaagaagcttctggaaatgttgcagagcaaaggactttctgccaaggctaccgaggaagaccatgagagaacaagacgactggcagaggcagagatgcacgttcatcacctagaaagccttttggagcagaaggaaaaagagaacagtatgttgagagaggagatgcatcgaaggtttgagaatgctcctgattctgccaaaacaaaagctctgcaaactgttattgagatgaaggattcaaaaatttcctctatggagcgtgggcttcgagacctggaagaggaaattcagatgctgaaatcgaatggtgctttgagtactgaggaaagggaagaagaaatgaagcaaatggaagtgtatcggagccattctaaatttatgaaaaataagattggccaggtgaaacaggagctgtccagaaaggacacagaactactcgccctgcagacaaagctagaaacactcacaaaccagttctcagatagtaaacagcacattgaagtgttgaaggagtccttgactgctaaggagcagagggctgccatcctgcagactgaggtggatgctctccgattgcgtttggaagagaaggaaaccatgttgaataaaaagacaaaacaaattcaggatatggctgaagagaaggggacacaagctggagagatacatgacctcaaggacatgttggatgtgaaggagcggaaggttaatgttcttcagaagaagattgaaaatcttcaagagcagcttagagacaaggaaaagcagatgagcagcttgaaagaacgggtcaaatccttgcaggctgacaccaccaacactgacactgccttgacaactttggaggaggcccttgcagagaaagagcggacaattgaacgcttaaaggagcagagggacagagatgagcgagagaagcaagaggaaattgataactacaaaaaagatcttaaagacttgaaggaaaaagtcagcctgttgcaaggcgacctttcagagaaagaggcttcacttttggatctgaaagagcatgcttcttctctggcatcctcaggactgaaaaaggactcacggcttaagacactagagattgctttggagcagaagaaggaggagtgtctgaaaatggaatcacaattgaaaaaggcacatgaggcagcattggaagccagagccagtccagagatgagtgaccgaatacagcacttggagagagagatcaccaggtacaaagatgaatctagcaaggcccaggcagaagttgatcgactcttagaaatcttgaaggaggtggaaaatgagaagaatgacaaagataagaagatagctgagttggaaaggcaagtgaaagaccagaataagaaggtagcaaatctgaagcacaaggaacaggtggaaaaaaagaagagtgcacaaatgttagaggaggcgcgacgacgggaggacaatctcaacgacagctctcagcagctacaggacagtctccgtaagaaggatgacaggattgaagagctggaagaagcactaagagaaagtgtacagataactgcagagcgggaaatggtgctagcacaagaggaatcagccaggaccaatgctgaaaaacaggtggaggagttactgatggccatggagaaggtaaagcaggaactagaatccatgaaagcaaagctgtcctccacccagcagtctctggcagaaaaggaaactcacttgactaatcttcgggcagagagaaggaaacacttagaggaagttctggagatgaagcaagaagctcttctggctgccattagtgaaaaagacgccaatatagctctcttggagctttcgtcctctaagaagaagacccaagaggaagtggctgccctgaagcgggagaaggatcgtctggtacagcagcttaagcagcagacgcaaaatcgaatgaagctaatggccgacaactacgaggatgaccacttcaaatcctcccattccaatcaaacaaatcacaagccctccccagaccagatcatccagcccctcttagaacttgaccaaaatagaagtaaattaaagttgtacattggacacctgacaaccctctgccatgaccgagaccccctgatcctccgtggactcactccaccagcttcctataacttggacgatgaccaggcggcttgggagaatgagctgcagaagatgacccgggggcagcttcaggatgagttagagaaaggtgaacgggacaatgcagaactgcaggagtttgccaacgccattcttcagcagatagcagaccattgtcccgacatcctagagcaagtggtcaacgccctggaagagtcctcttgaccctgctttatggggaagcctgaggtagtcaacccaggagccaagaaaagagaactacgaggaacaggtgcccggaaccttcttggcaccaaacactacaaacttcatcccaacttgctcacttgaagaagtgtgattccagcaccgtttctacatctgccatcttactctgcctttctgctttggatgtggtctctacactaaccttcttgatgtccagggtagataaagggtcgaatctctctgaagaactgccacctggtcatcagcagtggagaactgtgggagctggtggctctgccctgacagagagccatggagcagaggagcctctcacctcctgtcctctgacatgagaatgaaaccaggaatggacttggagttcaacaggctgagaggatgcctccaatggaccagagagctgagtgttctaatatcacaataggtgctttctcctaaaagggcaaaaaacaatctcaaaaagattagaaaaagagaaggggggaagggaagagaaaatcgactcttctttttactgtctcttctgcttactttccacatgagatgctttgtaccggggagctgtgagcaggcctcacgatggcttgggagcactcgttctcccaaggtctgagtcttcatccagccctgcctgtctgtcgcagccttcctcactctgttcctcggccagttaacaagaagatggtgtgaggtgttctccaccagtctctcctgtttgagactgttgacgttatcatactgaggtgttagatcaaatatctctaattgaagaacatgtgaggttgaaagagcaccagccagggcaacatagcgtgaccctgtctctacaaaaaattaaaaagagaacatacaaagttgacatatgagaccctgttgtccccgcctgcagctttgccccagtaacagatgcccgttgctcttgggctggtttcccctgaacacctccaagaggctgcctgccttgccagcacccgtgtcctgagctcctgcagcccagtggctgctgaagttgtgatccctcactcaccctgctagctttgcccttgactcgtcttctctgaacctcagcctcgtgcattgcctggaaccttcttctagcataaatgaaggtttttcctcctacacacattccttcctcggttatttcattcagagaatatttatgaaatgcctactgtgtgcaagtcatccatccttgaaaaggccacttctcagtgagggagagatgtagtggattctgtgagacatacctgctggagttgaagcagtaaatagcatgtccttcccctccccgatcttaaggtgtgttttctagaaaagttccctaatggaattcatgagtttgggggtctcagtcacccgcttgcctgtaggattccatttgatgattctggatttttgctgtttgttattgcccttagaggggctctgagtatctacttgtgggtggccatttcctgacatctgcatgtacctcgtggaattcagccagcttcatgttgcaaatcagaaagctgaccccaagactgcaaatcaatgaaggtattggcattgttaaggacgtagcgtagacaacagcagtcataaataattaggcaggaacttaacccaaatctagttctttgaccacctctaccaccagaacccagcagacactcacatctcctgataagagttgctggactcgatgtttttgttttgcattttctcctctccttccccacttactcagagaatttaaagtctgtagagtcagcacagccccatcagtccaggaacttcccaccaccagcccttgactgtcccattaactgacatggtcagatttccagctccccctactccctgctgtgaaacaatccctctccctgtgagaggaaactgtggagcgtttcttatcgaaggttaaatggactctgctcataaacctcttactgagatgcttcctgatagccaggctggccagagaggggtgcaggggttagatagtaagtggtggtcgtttgtggtcagttacctcaattctgttcattgcagtgcccgtaaaccatgtagaaagctcccagcactgaaaggcaggagtgttagcatctcgctttatccaccataacgtaaagaactgcggtgtgataacagccttcacggggccacggtggaaccaagacagcaggcgaggccatgcctaaacaagtggtctggcacgggcactggccagctgctctctccaagcaggtggcccagatcccacccacgtggactttctcatcaggtgcagcgcctgccactctcagccactgggtgtgtcactctcctcttcatctcagcattctccatcacttcccctccagaaaaacggatggaaggaagccctctgtgacactgcttctgagaagaagcatttccgggaccgatatcatctgtctggtctctgtgaacagcaaggaatcttcttgaccgttcttgggcactggaggctggctaggagttcagtaataaacgtggccttcgtgctgtagggcagagtggatgcagtttgtagctttcagagtgtctcattgagtctagatcattgaaccaacacttaaccaaatgtcccactcccatcacactaggacttgtcattccatgcccctctcctagtggtcatggtttcatatgggcatacaactgctactgaagttatatagccttgaaaactcagtgcaggttgcccttaattttccccaaacccctccatcggcaagtctagttgccctttagcacctaaagatctgcaccccaaaccaatgtcaccataaagagggcacgaagaagagtgggtgtgatcccaacggggttttgtaactgaagaagcccagtgtgagcttctcatcttttcatatacctctaacccccggtactcattgaatcattgatgaggtatctcaattgagatttgcaaggactttgataccatttgaaatggaaaaattttgaacgggctttaacatgtttaagaaatatggatggggccggccacagtggctcacgcctgtaatcccagaactctggaaggctgaggcaggcggatcacctgagatcaggagttcgaggccagcctggccaagatggcaaaaaccccgactctactaaaaatacaaaattagccaggcgtggtggcgtacgcctgtaatcccagctactcaggaggcaggagaatcgcttgagcctgggaggcagaggctgcggtgagccgagatcgtgtcactgcactccagcctgggtgacagagactccatttaaaaaaaaaaaaaaaaaatatatatatatatatatatatatatatatggatgggaatcaccaaattcatctcagctctaaccttttaacctttgtccttgcactttacaatctaaagatctacctgtggctctcagacttcctcacacttgggttttagaaataacttgtaaagcagactggacccaaggccgccttcagtgtcaagaagggcattgtgacttgcccctcaatttctgtccattgaagtctggttttccatgaggaacttgcgggctcacccacccccagagtgagagaagaggaaggcgaagtcatcacagacacggtcttagccacctgctgaactaatccctccgctattgagggtcagggttgtgaggcaaccatcatgtgtcaccccaaaatataaatgtttctgagccgcccatccactggcatttggatttgctgccagagtcctgttcctcccagaaccatcccgccctcctgttgaccatgttacttgagtgtaggcccggtgtcaagaccctcagagtctttgaggaaagagccaagcagagaagaccgctgcgtggagtgtgacaccacatggcatttctcaagcccagcggaccctgtgtcagcaaataccagtaatttaacatctgctcctggcctcctcttcacctgcctgggttcggaactgaggaggaaggatgagaagagactgcaatgcagcaggcaccctctgcagagtgaggccgcccgtccatcactgccagccctgggctgctcaggaggggacgtgaaccactcaaaggaatgtcttaaagaggatctggagtttcccccatgcaaattagggaagaattaggcaagaaaagacatacattacagggaaatccttctgaacaaaatggctgtcttcacctactcttcttgcaagaaaagacatacattacagggaaatccttctgaacaaaatggctatcttcacctactcttcagcaaaaaccgtctccagactttttagtgtcaaaaatgtaaccaactgtctcctgattttttccaatgtgtttggcaagtgctgtggccctgttgtaggtacttctcctgactcttgggggagaagtggttttagggattgatttgggggagcgggtttttgtcccatcccacctcctctcttctttctctgcttgtcgatattgtctgtgtgattcagagaattggggcagttacattgtgtctgttgttgagattattaaaagattaaaacgtagttgtagaaatgaaaaattaaacagctgtgttttaaaaatgcaaaccaatatcttgttaataaaggaattcaagctatggggcagccacactcccctcctcccaggctggcataggtggccctgggctggcggcttaggaagcatggagcacacttagggtagtgcctgcctgggcaagagacacctgccgagcaaaaggaacgagaatctggggctcagagcctcgcagttgtgccaggattttcctatacatgttcaggacctctgggtagaggtttcacagtttgtgaccccataaccaccctcacccgacgtgggttctagctcagtgtgcctaatactgcatggtaacctgggcttgaccctgaagcccctgcctggcaggccacaggacctctcctgcccacttggtgctatctcttccagtgaccacccagcacgggtgagcactggccagcctggagcctgcaatccaggtggaacagactgtcctccatgtcagttccttctggcttcaggccctcaattatttccctttgagcttttttagaccctagatctcctaggcccaggctctctcttgaccccagagaagccactgtcaggaaaggaagtgaaccctactgaagccagagaattcaccccggccaaagcaggccctctgggtccagcccctcattccacaccacgccagtattgcatccatctactgcagctacacatcctgagggcagcaccacccactctggcctgctggcccatcgcaggactagcccaggcacctgccgggcattgcaggatatccagtggggcctgtgactgctccctgatgcgtcagaagagaagtgttgcactttagtggaggagctgaggagcacctgcccccttgtagcttgagttccttttggtaacagtagcagcctccatggtggtgtctgggatgcacgtgcacccgctgccttcagctgtatgtgtgtgttcctgctggagttgtgttactgacaggataatgacattacaaagaaattgtgttatattcaactttgccttgataattattgtaaacactttgttcattttttcttttttattcacaaactaaatccaccaggaaattataaagttatttaaaaaccgt

SEQ ID NO: 9 - DNA, 9202 bp, homo sapiens
gatatggtgtaagatacttcttcaagattggacagctggggaccttcttctgattaaccttaaaccaacttgtagccatagagacacctcacaaggttcccatttttgttgttgttgttgttgattttctgctcacacctttcctgaccttgcaaccatgtatggaagtgcccgctctgttgggaaggtggagccgagcagccagagccctgggcgttcacccaggcttccacgttcccctcgcttgggtcaccgtcgaaccaacagtacgggagggagttcgggaagcagtgttggaggtggcagtgggaaaaccctttcaatggaaaatatacaatctttaaatgctgcctatgccacctctggccctatgtatctaagtgaccatgaaaatgtgggttcagaaacacctaaaagcaccatgacacttggccgttctgggggacgtctgccttacggtgttcggatgactgctatgggtagtagccccaatatagctagcagtggggttgctagtgacaccatagcatttggagagcatcacctccctcctgtgagtatggcatccactgtacctcactcccttcgtcaggcgagagataacacaatcatggatctgcagacacagctgaaggaagtattaagagaaaatgatctcttgcggaaggatgtggaagtaaaggagagcaaattgagttcttcaatgaatagcatcaagaccttctggagcccagagctgaagaaggaacgagccctgagaaaagatgaagcttccaaaatcaccatttggaaggaacagtacagagttgtacaggaggaaaaccagcacatgcagatgacaatccaggctctccaggatgaattgcggatccagagggacctgaatcagctgtttcagcaggatagtagcagcaggactggcgaaccttgtgtagcagagctgacagaggagaactttcagaggcttcatgctgagcatgagcggcaggccaaagagctgtttcttcttcgaaagacattggaggaaatggagctgcgtattgagactcaaaagcagaccctaaatgctcgggatgaatccattaagaagcttctggaaatgttgcagagcaaaggactttctgccaaggctaccgaggaagaccatgagagaacaagacgactggcagaggcagagatgcacgttcatcacctagaaagccttttggagcagaaggaaaaagagaacagtatgttgagagaggagatgcatcgaaggtttgagaatgctcctgattctgccaaaacaaaagctctgcaaactgttattgagatgaaggattcaaaaatttcctctatggagcgtgggcttcgagacctggaagaggaaattcagatgctgaaatcgaatggtgctttgagtactgaggaaagggaagaagaaatgaagcaaatggaagtgtatcggagccattctaaatttatgaaaaataaggtagaacaactgaaggaggaactaagttcgaaagaggctcaatgggaggagctgaaaaagaaagcggctggtcttcaggctgagattggccaggtgaaacaggagctgtccagaaaggacacagaactactcgccctgcagacaaagctagaaacactcacaaaccagttctcagatagtaaacagcacattgaagtgttgaaggagtccttgactgctaaggagcagagggctgccatcctgcagactgaggtggatgctctccgattgcgtttggaagagaaggaaaccatgttgaataaaaagacaaaacaaattcaggatatggctgaagagaaggggacacaagctggagagatacatgacctcaaggacatgttggatgtgaaggagcggaaggttaatgttcttcagaagaagattgaaaatcttcaagagcagcttagagacaaggaaaagcagatgagcagcttgaaagaacgggtcaaatccttgcaggctgacaccaccaacactgacactgccttgacaactttggaggaggcccttgcagagaaagagcggacaattgaacgcttaaaggagcagagggacagagatgagcgagagaagcaagaggaaattgataactacaaaaaagatcttaaagacttgaaggaaaaagtcagcctgttgcaaggcgacctttcagagaaagaggcttcacttttggatctgaaagagcatgcttcttctctggcatcctcaggactgaaaaaggactcacggcttaagacactagagattgctttggagcagaagaaggaggagtgtctgaaaatggaatcacaattgaaaaaggcacatgaggcagcattggaagccagagccagtccagagatgagtgaccgaatacagcacttggagagagagatcaccaggtacaaagatgaatctagcaaggcccaggcagaagttgatcgactcttagaaatcttgaaggaggtggaaaatgagaagaatgacaaagataagaagatagctgagttggaaaggcaagtgaaagaccagaataagaaggtagcaaatctgaagcacaaggaacaggtggaaaaaaagaagagtgcacaaatgttagaggaggcgcgacgacgggaggacaatctcaacgacagctctcagcagctacaggacagtctccgtaagaaggatgacaggattgaagagctggaagaagcactaagagaaagtgtacagataactgcagagcgggaaatggtgctagcacaagaggaatcagccaggaccaatgctgaaaaacaggtggaggagttactgatggccatggagaaggtaaagcaggaactagaatccatgaaagcaaagctgtcctccacccagcagtctctggcagaaaaggaaactcacttgactaatcttcgggcagagagaaggaaacacttagaggaagttctggagatgaagcaagaagctcttctggctgccattagtgaaaaagacgccaatatagctctcttggagctttcgtcctctaagaagaagacccaagaggaagtggctgccctgaagcgggagaaggatcgtctggtacagcagcttaagcagcagacgcaaaatcgaatgaagctaatggccgacaactacgaggatgaccacttcaaatcctcccattccaatcaaacaaatcacaagccctccccagaccagatcatccagcccctcttagaacttgaccaaaatagaagtaaattaaagttgtacattggacacctgacaaccctctgccatgaccgagaccccctgatcctccgtggactcactccaccagcttcctataacttggacgatgaccaggcggcttgggagaatgagctgcagaagatgacccgggggcagcttcaggatgagttagagaaaggtgaacgggacaatgcagaactgcaggagtttgccaacgccattcttcagcagatagcagaccattgtcccgacatcctagagcaagtggtcaacgccctggaagagtcctcttgaccctgctttatggggaagcctgaggtagtcaacccaggagccaagaaaagagaactacgaggaacaggtgcccggaaccttcttggcaccaaacactacaaacttcatcccaacttgctcacttgaagaagtgtgattccagcaccgtttctacatctgccatcttactctgcctttctgctttggatgtggtctctacactaaccttcttgatgtccagggtagataaagggtcgaatctctctgaagaactgccacctggtcatcagcagtggagaactgtgggagctggtggctctgccctgacagagagccatggagcagaggagcctctcacctcctgtcctctgacatgagaatgaaaccaggaatggacttggagttcaacaggctgagaggatgcctccaatggaccagagagctgagtgttctaatatcacaataggtgctttctcctaaaagggcaaaaaacaatctcaaaaagattagaaaaagagaaggggggaagggaagagaaaatcgactcttctttttactgtctcttctgcttactttccacatgagatgctttgtaccggggagctgtgagcaggcctcacgatggcttgggagcactcgttctcccaaggtctgagtcttcatccagccctgcctgtctgtcgcagccttcctcactctgttcctcggccagttaacaagaagatggtgtgaggtgttctccaccagtctctcctgtttgagactgttgacgttatcatactgaggtgttagatcaaatatctctaattgaagaacatgtgaggttgaaagagcaccagccagggcaacatagcgtgaccctgtctctacaaaaaattaaaaagagaacatacaaagttgacatatgagaccctgttgtccccgcctgcagctttgccccagtaacagatgcccgttgctcttgggctggtttcccctgaacacctccaagaggctgcctgccttgccagcacccgtgtcctgagctcctgcagcccagtggctgctgaagttgtgatccctcactcaccctgctagctttgcccttgactcgtcttctctgaacctcagcctcgtgcattgcctggaaccttcttctagcataaatgaaggtttttcctcctacacacattccttcctcggttatttcattcagagaatatttatgaaatgcctactgtgtgcaagtcatccatccttgaaaaggccacttctcagtgagggagagatgtagtggattctgtgagacatacctgctggagttgaagcagtaaatagcatgtccttcccctccccgatcttaaggtgtgttttctagaaaagttccctaatggaattcatgagtttgggggtctcagtcacccgcttgcctgtaggattccatttgatgattctggatttttgctgtttgttattgcccttagaggggctctgagtatctacttgtgggtggccatttcctgacatctgcatgtacctcgtggaattcagccagcttcatgttgcaaatcagaaagctgaccccaagactgcaaatcaatgaaggtattggcattgttaaggacgtagcgtagacaacagcagtcataaataattaggcaggaacttaacccaaatctagttctttgaccacctctaccaccagaacccagcagacactcacatctcctgataagagttgctggactcgatgtttttgttttgcattttctcctctccttccccacttactcagagaatttaaagtctgtagagtcagcacagccccatcagtccaggaacttcccaccaccagcccttgactgtcccattaactgacatggtcagatttccagctccccctactccctgctgtgaaacaatccctctccctgtgagaggaaactgtggagcgtttcttatcgaaggttaaatggactctgctcataaacctcttactgagatgcttcctgatagccaggctggccagagaggggtgcaggggttagatagtaagtggtggtcgtttgtggtcagttacctcaattctgttcattgcagtgcccgtaaaccatgtagaaagctcccagcactgaaaggcaggagtgttagcatctcgctttatccaccataacgtaaagaactgcggtgtgataacagccttcacggggccacggtggaaccaagacagcaggcgaggccatgcctaaacaagtggtctggcacgggcactggccagctgctctctccaagcaggtggcccagatcccacccacgtggactttctcatcaggtgcagcgcctgccactctcagccactgggtgtgtcactctcctcttcatctcagcattctccatcacttcccctccagaaaaacggatggaaggaagccctctgtgacactgcttctgagaagaagcatttccgggaccgatatcatctgtctggtctctgtgaacagcaaggaatcttcttgaccgttcttgggcactggaggctggctaggagttcagtaataaacgtggccttcgtgctgtagggcagagtggatgcagtttgtagctttcagagtgtctcattgagtctagatcattgaaccaacacttaaccaaatgtcccactcccatcacactaggacttgtcattccatgcccctctcctagtggtcatggtttcatatgggcatacaactgctactgaagttatatagccttgaaaactcagtgcaggttgcccttaattttccccaaacccctccatcggcaagtctagttgccctttagcacctaaagatctgcaccccaaaccaatgtcaccataaagagggcacgaagaagagtgggtgtgatcccaacggggttttgtaactgaagaagcccagtgtgagcttctcatcttttcatatacctctaacccccggtactcattgaatcattgatgaggtatctcaattgagatttgcaaggactttgataccatttgaaatggaaaaattttgaacgggctttaacatgtttaagaaatatggatggggccggccacagtggctcacgcctgtaatcccagaactctggaaggctgaggcaggcggatcacctgagatcaggagttcgaggccagcctggccaagatggcaaaaaccccgactctactaaaaatacaaaattagccaggcgtggtggcgtacgcctgtaatcccagctactcaggaggcaggagaatcgcttgagcctgggaggcagaggctgcggtgagccgagatcgtgtcactgcactccagcctgggtgacagagactccatttaaaaaaaaaaaaaaaaaatatatatatatatatatatatatatatatggatgggaatcaccaaattcatctcagctctaaccttttaacctttgtccttgcactttacaatctaaagatctacctgtggctctcagacttcctcacacttgggttttagaaataacttgtaaagcagactggacccaaggccgccttcagtgtcaagaagggcattgtgacttgcccctcaatttctgtccattgaagtctggttttccatgaggaacttgcgggctcacccacccccagagtgagagaagaggaaggcgaagtcatcacagacacggtcttagccacctgctgaactaatccctccgctattgagggtcagggttgtgaggcaaccatcatgtgtcaccccaaaatataaatgtttctgagccgcccatccactggcatttggatttgctgccagagtcctgttcctcccagaaccatcccgccctcctgttgaccatgttacttgagtgtaggcccggtgtcaagaccctcagagtctttgaggaaagagccaagcagagaagaccgctgcgtggagtgtgacaccacatggcatttctcaagcccagcggaccctgtgtcagcaaataccagtaatttaacatctgctcctggcctcctcttcacctgcctgggttcggaactgaggaggaaggatgagaagagactgcaatgcagcaggcaccctctgcagagtgaggccgcccgtccatcactgccagccctgggctgctcaggaggggacgtgaaccactcaaaggaatgtcttaaagaggatctggagtttcccccatgcaaattagggaagaattaggcaagaaaagacatacattacagggaaatccttctgaacaaaatggctgtcttcacctactcttcttgcaagaaaagacatacattacagggaaatccttctgaacaaaatggctatcttcacctactcttcagcaaaaaccgtctccagactttttagtgtcaaaaatgtaaccaactgtctcctgattttttccaatgtgtttggcaagtgctgtggccctgttgtaggtacttctcctgactcttgggggagaagtggttttagggattgatttgggggagcgggtttttgtcccatcccacctcctctcttctttctctgcttgtcgatattgtctgtgtgattcagagaattggggcagttacattgtgtctgttgttgagattattaaaagattaaaacgtagttgtagaaatgaaaaattaaacagctgtgttttaaaaatgcaaaccaatatcttgttaataaaggaattcaagctatggggcagccacactcccctcctcccaggctggcataggtggccctgggctggcggcttaggaagcatggagcacacttagggtagtgcctgcctgggcaagagacacctgccgagcaaaaggaacgagaatctggggctcagagcctcgcagttgtgccaggattttcctatacatgttcaggacctctgggtagaggtttcacagtttgtgaccccataaccaccctcacccgacgtgggttctagctcagtgtgcctaatactgcatggtaacctgggcttgaccctgaagcccctgcctggcaggccacaggacctctcctgcccacttggtgctatctcttccagtgaccacccagcacgggtgagcactggccagcctggagcctgcaatccaggtggaacagactgtcctccatgtcagttccttctggcttcaggccctcaattatttccctttgagcttttttagaccctagatctcctaggcccaggctctctcttgaccccagagaagccactgtcaggaaaggaagtgaaccctactgaagccagagaattcaccccggccaaagcaggccctctgggtccagcccctcattccacaccacgccagtattgcatccatctactgcagctacacatcctgagggcagcaccacccactctggcctgctggcccatcgcaggactagcccaggcacctgccgggcattgcaggatatccagtggggcctgtgactgctccctgatgcgtcagaagagaagtgttgcactttagtggaggagctgaggagcacctgcccccttgtagcttgagttccttttggtaacagtagcagcctccatggtggtgtctgggatgcacgtgcacccgctgccttcagctgtatgtgtgtgttcctgctggagttgtgttactgacaggataatgacattacaaagaaattgtgttatattcaactttgccttgataattattgtaaacactttgttcattttttcttttttattcacaaactaaatccaccaggaaattataaagttattt

SEQ ID NO: 10 - DNA, 868 bp, homo sapiens
agatgtggggatcctggggcgggaggtgggggagtggggactggggctctgggcacttggggagcggagggggggaggcttaggactagtgaagccgcggacgaggtagtggggagacggagaaattggggagccatgaggttggggtgcggtcagggtggatctttgggttagggtagtttgaagtttgagtatcctcacgacatggcagctggattcctgagagagagtgatttgagagagtgacgaagacagaagccccagtgtcttttaagaatatggtgtaagatacttcttcaagattggacagctggggaccttcttctgattaaccttaaaccaacttgtagccatagagacacctcacaaggttcccatttttgttgttgttgttgttgattttctgctcacacctttcctgaccttgcaaccatgtatggaagtgcccgctctgttgggaaggtggagccgagcagccagagccctgggcgttcacccaggcttccacgttcccctcgcttgggtcaccgtcgaaccaacagtacgggagggagttcgggaagcagtgttggaggtggcagtgggaaaaccctttcaatggaaaatatacaatctttaaatgctgcctatgccacctctggccctatgtatctaagtgaccatgaaaatgtgggttcagaaacacctaaaagcaccatgacacttggccgttctgggggacgtctgccttacggtgttcggatgactgctatgggtagtagccccaatatagctagcagtggggttgctagtgacaccatagcatttggagagcatcacctccctcctgtgagtatggcatccactgtacctcactcccttcgtcagg

SEQ ID NO: 11 - DNA, 2832 bp, homo sapiens
gatatggtgtaagatacttcttcaagattggacagctggggaccttcttctgattaaccttaaaccaacttgtagccatagagacacctcacaaggttcccatttttgttgttgttgttgttgattttctgctcacacctttcctgaccttgcaaccatgtatggaagtgcccgctctgttgggaaggtggagccgagcagccagagccctgggcgttcacccaggcttccacgttcccctcgcttgggtcaccgtcgaaccaacagtacgggagggagttcgggaagcagtgttggaggtggcagtgggaaaaccctttcaatggaaaatatacaatctttaaatgctgcctatgccacctctggccctatgtatctaagtgaccatgaaaatgtgggttcagaaacacctaaaagcaccatgacacttggccgttctgggggacgtctgccttacggtgttcggatgactgctatgggtagtagccccaatatagctagcagtggggttgctagtgacaccatagcatttggagagcatcacctccctcctgtgagtatggcatccactgtacctcactcccttcgtcaggcgagagataacacaatcatggatctgcagacacagctgaaggaagtattaagagaaaatgatctcttgcggaaggatgtggaagtaaaggagagcaaattgagttcttcaatgaatagcatcaagaccttctggagcccagagctgaagaaggaacgagccctgagaaaagatgaagcttccaaaatcaccatttggaaggaacagtacagagttgtacaggaggaaaaccaggtggatgctctccgattgcgtttggaagagaaggaaaccatgttgaataaaaagacaaaacaaattcaggatatggctgaagagaaggggacacaagctggagagatacatgacctcaaggacatgttggatgtgaaggagcggaaggttaatgttcttcagaagaagattgaaaatcttcaagagcagcttagagacaaggaaaagcagatgagcagcttgaaagaacgggtcaaatccttgcaggctgacaccaccaacactgacactgccttgacaactttggaggaggcccttgcagagaaagagcggacaattgaacgcttaaaggagcagagggacagagatgagcgagagaagcaagaggaaattgataactacaaaaaagatcttaaagacttgaaggaaaaagtcagcctgttgcaaggcgacctttcagagaaagaggcttcacttttggatctgaaagagcatgcttcttctctggcatcctcaggactgaaaaaggactcacggcttaagacactagagattgctttggagcagaagaaggaggagtgtctgaaaatggaatcacaattgaaaaaggcacatgaggcagcattggaagccagagccagtccagagatgagtgaccgaatacagcacttggagagagagatcaccaggtacaaagatgaatctagcaaggcccaggcagaagttgatcgactcttagaaatcttgaaggaggtggaaaatgagaagaatgacaaagataagaagatagctgagttggaaagtctcacctcaaggcaagtgaaagaccagaataagaaggtagcaaatctgaagcacaaggaacaggtggaaaaaaagaagagtgcacaaatgttagaggaggcgcgacgacgggaggacaatctcaacgacagctctcagcagctacaggacagtctccgtaagaaggatgacaggattgaagagctggaagaagcactaagagaaagtgtacagataactgcagagcgggaaatggtgctagcacaagaggaatcagccaggaccaatgctgaaaaacaggtggaggagttactgatggccatggagaaggtaaagcaggaactagaatccatgaaagcaaagctgtcctccacccagcagtctctggcagaaaaggaaactcacttgactaatcttcgggcagagagaaggaaacacttagaggaagttctggagatgaagcaagaagctcttctggctgccattagtgaaaaagacgccaatatagctctcttggagctttcgtcctctaagaagaagacccaagaggaagtggctgccctgaagcgggagaaggatcgtctggtacagcagcttaagcagcagacgcaaaatcgaatgaagctaatggccgacaactacgaggatgaccacttcaaatcctcccattccaatcaaacaaatcacaagccctccccagaccaggatgaggaggagggtatatgggcatagccaatcagaggcttagttcagccattttgttcagaacgatcatccagcccctcttagaacttgaccaaaatagaagtaaattaaagttgtacattggacacctgacaaccctctgccatgaccgagaccccctgatcctccgtggactcactccaccagcttcctataacttggacgatgaccaggcggcttgggagaatgagctgcagaagatgacccgggggcagcttcaggatgagttagagaaaggtgaacgggacaatgcagaactgcaggagtttgccaacgccattcttcagcagatagcagaccattgtcccgacatcctagagcaagtggtcaacgccctggaagagtcctcttgaccctgctttatggggaagcctgaggtagtcaacccaggagccaagaaaagagaactacgaggaacaggtgcccggaaccttcttggcaccaaacactacaaacttcatcccaacttgctcacttgaagaagtgtgattccagcaccg

SEQ ID NO: 12 - DNA, 1275 bp, homo sapiens
agtggcggcggcggcggtgcctgggcggcagcagcagcagtagcggcagccctgaggacggtgagacggccgcggcggcggcgacagcgcggaagtcgcgcgggacccagagcttcccccctgtcgctagtgctgaggctttcgcctttcctacccagcttcttgctcacggcccgggctgggctgggcagggcaacgcgcccccggggaggggcggagctgtaggcgagagataacacaatcatggatctgcagacacagctgaaggaagtattaagagaaaatgatctcttgcggaaggatgtggaagtaaaggagagcaaattgagttcttcaatgaatagcatcaagaccttctggagcccagagctgaagaaggaacgagccctgagaaaagatgaagcttccaaaatcaccatttggaaggaacagtacagagttgtacaggaggaaaaccagcacatgcagatgacaatccaggctctccaggatgaattgcggatccagagggacctgaatcagctgtttcagcaggatagtagcagcaggactggcgaaccttgtgtagcagagctgacagaggagaactttcagaggcttcatgctgagcatgagcggcaggccaaagagctgtttcttcttcgaaagacattggaggaaatggagctgcgtattgagactcaaaagcagaccctaaatgctcgggatgaatccattaagaagcttctggaaatgttgcagagcaaaggactttctgccaaggctaccgaggaagaccatgagagaacaagacgactggcagaggcagagatgcacgttcatcacctagaaagccttttggagcagaaggaaaaagagaacagtatgttgagagaggagatgcatcgaaggtttgagaatgctcctgattctgccaaaacaaaagctctgcaaactgttattgagatgaaggattcaaaaatttcctctatggagcgtgggcttcgagacctggaagaggaaattcagatgctgaaatcgaatggtgctttgagtactgaggaaagggaagaagaaatgaagcaaatggaagtgtatcggagccattctaaatttatgaaaaataagattggccaggtgaaacaggagctgtccagaaaggacacagaactactcgccctgcagacaaagctagaaacactcacaaaccagttctcagatagtaaacagcacattgaagtgttgaaggagtccttgactgctaaggagcagagggctgccatcctgcagactgag

SEQ ID NO: 13 - DNA, 569392 bp, macaca fascicularis
  misc_feature (1006)..(1249): n is a, c, g, or t
  misc_feature (3398)..(3485): n is a, c, g, or t
  misc_feature (13021)..(13030): n is a, c, g, or t
  misc_feature (17126)..(17509): n is a, c, g, or t
  misc_feature (39204)..(39234): n is a, c, g, or t
  misc_feature (72930)..(73842): n is a, c, g, or t
  misc_feature (113155)..(113779): n is a, c, g, or t
  misc_feature (171736)..(172553): n is a, c, g, or t
  misc_feature (206433)..(206532): n is a, c, g, or t
  misc_feature (208831)..(208954): n is a, c, g, or t
  misc_feature (214386)..(214502): n is a, c, g, or t
  misc_feature (219387)..(219486): n is a, c, g, or t
  misc_feature (305151)..(305832): n is a, c, g, or t
  misc_feature (355708)..(356697): n is a, c, g, or t
  misc_feature (361255)..(361354): n is a, c, g, or t
  misc_feature (482505)..(485419): n is a, c, g, or t
  misc_feature (486054)..(486236): n is a, c, g, or t
  misc_feature (489867)..(490392): n is a, c, g, or t
  misc_feature (496045)..(521734): n is a, c, g, or t
  misc_feature (522778)..(523448): n is a, c, g, or t
aggatgaaaaacagtagaaacgggtgagtgaatgcatgtgaacgcagagaagcgactggaatttgttagtgggattatgaggcagtggttaattacggtggcggaggtgagtaggagtaaaatgatggcttttaactccttttaaggacaccgagaattattttaataaacactggaaggctgggaataaatataattcacaccattcttactttcttgatttagagataagcttatctacatccttaaattaatggccgtagctaccctctgcatggttccaaaaaaaaaaaacaaaccaaaacccaaaccggctgcgagtctgcacgagaaaaccgggttgctccaggccccagccgcccgccgactcgcctagctgtcggaggccaaatacacagctcccgaagccgcgtcgggcaccgcgcagggtcggaaccgggacactaatttccgcccacgctccccgcgtccgggccggatcaccacagaacacgacgtccattgctggggtcctcggcgatgcccgtgtgcgcagccccgcgagtctcaggtcagatggccgctcatttcgcggccacgttccgccaagctaaggggcaaaaaaccagctttggtggaacaaagcgtgcccccagcagccacggtcggtccccgcgctggtcccgcggcgctgggcggccccgggcgcgggtaacgggccacgggaagaagggggcggggcgccacttaggttcgggaagacgcgacgcggctcctcgggcttccagcgtccacttcctacggcaagcgggaagagacaagcgccgccccgcgctcgcggagcagaccccggctctcccctcccgggccgcaggggtcgtgtgtgtgagtgggtacgcgtgtgtgtacgcagggctgctccgcgcctctcgctcggtttcggtgctgatcgaccgccgcggcgccgaatttcccccgcttcccagttcctcacccgcgtgtcccggaaggcgcccggaggcccccnnnnnnnnnnnnnnnnnnnnnnnnnnnnnnnnnnnnnnnnnnnnnnnnnnnnnnnnnnnnnnnnnnnnnnnnnnnnnnnnnnnnnnnnnnnnnnnnnnnnnnnnnnnnnnnnnnnnnnnnnnnnnnnnnnnnnnnnnnnnnnnnnnnnnnnnnnnnnnnnnnnnnnnnnnnnnnnnnnnnnnnnnnnnnnnnnnnnnnnnnnnnnnnnnnnnnnnnnnnnnnnnnnnnnnnnnnnnnnnnnnnngcagcagcggcagccctgagaagggtgagacgggcgcgacggcggcggcagcgcggaagtcgcgcgggacccagagcttcccccgtgtcgctagcgctgaggcttttgcctttcctgcccagcttcttgctcacggcccgggctgggctgggcgacgcgcccccggggaggggcggagctgtaggtgaggcttcgcgaccccctccccctcccggccagcccgggggtggggaggggcgggccccacccagaccacggcgcccacccgccggctccacccagccaggctccgggattgggcgggagccgaggcggtggatgtggggatcctggggcgggaggtcggggactggggtctggggctctgggcacttggggagcggagggggggaggcttaggactagtgaagctgcggaccaggtagtgggcagacggagaaattggggagccatgaggttggggtgcggtcagggtggatctttgggttaggtgagtgatgtaaaatgctgaagatgattcttttctttttgatgaaatggtgagataaaagatgaagtgttgtatttcaaaaggacgatgagccgtgcatgttacctttgaggcagtcggagaacctattttattgcactggatctgtcacgtttctactttagagttcgattcttttccttctagcggggtggatgggggctcggagagggaaggtgctttggctcaggtaaactgagtgtggatggatctgaaagttttacacccaagaagagggagatcttcggtttagacaacttcgttctggcagccaccatttgggtcgcattactcttagctccttcaaggtggtgtcttccaggttttttatccccctgtgcctaaaagatctctttataccacccttttacaggctgtatcctggtcccttgagagaaggccccagatcaggtggttgctttggaaggcacgtttctgaataatagttgcaggtggttgtggttgactactttgggtggatcaagtgaacaatttgaacagttctgttggagctaattatatgaaaaaatgctgaaatgttttaaagtacaaccgtcttttacagcgtgttgcccagcaaaccttgacttttagacattttgtgttcagtgctaaattgttgaaattttatttctccgtttgcagttatacttcttgcggtctttattaaaacactttaaaatgaaatggaactttttttttggtaggtccctgaatttcagagaaatgttcttggagtcaagtgctttaaaaacattttgggggcatgtgtctcactttgtatggaaatattactaagaataaacagtgttccatgttcttcacatcactttttcacaacttagcactgtaaatcagaatcttgttttctggattcctgccccctgttagattacaatattcactggctctacttatcagttagtgtcatttaagctatttcttgttcagaaaacaggtcccatgatagacatgtattatgtaatggatggaagtagacatggctctcaataattcattaatggaggaagaggagctgtcagaaagtgggatttaagcagtgactttcccaaggcttacccagtttatttggaaaaatagccagagaagtgttttccttaacccaaaagagaaatatacagatacgaatttcagtagttgcagatcagtgctttttctaagtgcctacttgatgagcagattattgtcttccagcaaatacttctactttgtagagaggtatgggaaacaggacataataggtattaagtgagaaagtgtgtggtccaatttataattataaataaataactgtattcagttaattcatttgataaagtgaatagttttgactttggattagttagaaggaaaacttaaaattgacatatctagttttagcttttaaattatacataaacttaattaactgggacaaatgtgaactaagatactgggtaaaacttgtgtgtactcctaaaatgacatttgcatggctggtagtaagctgtgattcttgtccttgtaggaatgaaatcacataatttagggaaagtctaaggtaaaagtaagctatttctttcttttttttttttttctttttttttttttttttttttnnnnnnnnnnnnnnnnnnnnnnnnnnnnnnnnnnnnnnnnnnnnnnnnnnnnnnnnnnnnnnnnnnnnnnnnnnnnnnnnnnnnnnnnggcgccgccacctcgcccggctagtttttttgtattttttaatagagacggggtttcaccgtgttagccaggatggtctcgatctcccgacctcgtgatccgcccgtctcggcctcccaaagtgctgggattacaggcttgagccaccgcgcccggccaagtaagctatttcgtttagcatttcttgtgcctacattttatttttcaaaaaatgttgcttgctagtcattacttgtgatatccttgttgagtctactgaggtgttctttttttttttcctttattacctatgtcatagataagtatgccagtctgttaattcagcattaatactgcaaacttaaaagtgaaggttctcaactgggctctgtggctcacgcttgtaatcccagcactttgggaggccgaggcaggcggatcacaaggtcaggagttcaagactaacctggccaagtgaaacctcatctctactaaaaatacaaaaattaggcaggcatggtggcgcacacctgtaaccccagctactcgggaggctgaggcagaagaatcgcttgaaccttggaggtggaggttgcagtgatccgagattgcgccactgcactccagcctggctcacagagcgagactctgtctcaaaaaaaaaaaaaaaaagtgaaggttctcatagcaacagctgctcggttttacactatgtttacttttagaagtagtatgagagttgttaaatgtgtattttacacatattccatcagaaacactagtggagaaagatcaaggaatgaagtattttggtcaagaatcattacattgattatcagttttcagagacatataataaaataaacagcatacagattatgtggaatataagtgtttttctttttcgtgtgtgtgtggggaatataattgaaatttgttgctcaccaagtgtttcagtgtattagagtgtgggttctggggtcagggtgcctgagttcaaatcctggctttgccatggtatgatgtagggcaaactgcttaatgttgtttatatcctagccttaacctgtgccttaatttcttcatctgcaaaatagaaataataacagtagtacctaacctcttaaactggttaaatgaatatgaattaattcatgtatttagaacactttgggcacataattagctggttcactaacatcatttgaagttttactgtgaatactatttttacttaataagtatgtattaaatacatattatgtaccccatatcctagatgctggtatcgtagtagtgaacaggtctcccagcactttgggaggccgaggtgggaggatggccaggcactctagcgacaccatgtctctacaaaaataaaaaaattaggccaggcgcggtggctcacgcctgtaatcctagcactttgggaggctgaggcgggtggatcatgaggtcaggagttcgagaccagcctagtcaacatggtgaaaccccattgctactaaaaatacaaaaaaattagctgggggtggtggcacatgcctataatcctggctactcacaaggctgaggcaggaaaatctctcgaacccaggaggcggaggttgcagtgagtggagatcgtaccattgcactccagcctaggcgacaaaggaagactctgtctttaaaaaaaaaaaaaaaaaattagcatggcagtatgtgcctacagtctcagctactcaggagactgaagcaggaggatcgcttgcgtttgaggttgcagtgagctgtcattccgccattgcactccagcctgggtgacggagggagggaggctatctcaaataaataataaataaataaaagtaagggcagtagtcaggagcctatgttgtactgtttcaggtgagggtgtctctgaccaaggtgaaatgctgagaaggggttggattttggatatattttgagggtagacctatagaatttgttggtgattgtttgtgggatgtgggccagacagaagaataaagagtaaggttggcctgagtaactagaagaataaagttgccggtaacttaaatggagatggtaattggtggagcgtgtttgtggagaaaccagaagttgagggtgatgtccaggaagagtgagaaatgtgactgtttgcagcttatttgtagtacttacaattgtgagataggtgagatcatcaggggagtgaattttggtagagaagagatccaagcatctgagccttgggggctgattcattcccttattcattcagaagctacttagtgagtatggttcttctgtgtacctttttaggcattggggatataaacctgacaaaaatcgtcaccttcatgaaacttaccttctagatacatggggggaaatgaagaggaaccagtagagtgatgagaaataattgagttcggaggaaaaccaggggagtatgatgttctagaagtgaaggaaaggaagctttcaagaaggagggaacgatcaactgtgtcattgtttaaagttgtgtcagaatgttgagtaagagaattctgcttaattataatgtctaataacagagaaatgactaaatatgttttagtgtgagatagatgaaacaaatgtaagagtcttttacttttagttttttacttctctgggttttttttttttttgagagggagtctcgctctgtctcccaggctggagtgcagtggtgcaatctctgctcactgcaagccccgcctcctgggttcatgccattctcctgcctcagcctccggagtagctggaactacaggtgcccgccaccatgcttggctatttttttttttttggttgtatttttagtagagacagggtttcactgtgttagccaggatgctcgacctcgtgatccacccgcctcggcctcccaaaatgctgggattacaggcatgagccaccgcgcctggcctcattctccgggttgactttttttttttaatactttatgttctagggtacctgtgcacaaagtgcaggtttattacatatgtatccatgtgccatgttggtgtgctgcacccattaacttgtcatttacattaggtatatctcctaatgctatccctccccactccccccttcccgctccaggttgatttttaagaaatatttcagccaggcacagtgtcacatgcctgtagtcccagctgctctggaggctgaggcaggaggattgcttgagtccaggagatcaaggctatagtgtgctgtgcttacatatgtgtgtagccactgcactccagcctgggcaacatagtgagaccccatctctaattaaaaaaatattcattcttttcagaacaaaataggcaacctgggagtactaaggaaaggtacatgactttttattgttgttaattttatgtacacttattttaagaaataggtaatatatgtgctaaattagaaagtgtaagagaatatacagttaaaagtctctcctatcccatctagttctttctgtaggcaatcactgtttgcagtttcttgttttttctttttaactagtgaaattttgtgtaatatgacattccttacctagtttaaaattgcataaatataaaaaatattttatcttccactttgatattgaacactggcaatattttatactttttgagaagggtctttgtctgttattcagtctggaatgcaatgttgtggctatagcttactgcaaccttgaattcctgggctcaaatgatcttcccacctcagcctccagagtagctgggactgtagccatgtgccaccatgcccggctaattaaaaaaaaatttgtagagagacaaggcgtcactatgttgcccaggcactgttttagaatagattatttaaaagatagttttagaagcctgtcaagggaaatagtgactgctaggatcaaacatggattcactaagtcacttcagacagtagttgcctagaattgacttggttacttgactgataaataaaggaaatgcagtagttggaatttatctagacgtcagctaggatttttcatgccatctttgtggaaagtatgaacatatgtgtcctagatttcttgaggtcaggaactatctattagatacttactaaatacttggtgaatgaatggatgctagcataataatgtgaattcacaacctgttgaatggctatccccaggaaatacagaagtgcttattgaggatcatgggtttgaggaacttggcgttagacaactcatccatacatttattgaaatgacacaggatggtagcaaaactggtggcatagaggataatggcagctgtgaactagttgccagcatatcctcactgagtatgggggatgtccaggtggtcattagctggtagtgaagaggtagaggtcaaagactgtgctgctgaatggcatgggaattagactaagccttttacataaggattcgggaacagtggtctggaactggcactggcagaaaggaaggtaccgtcctcatttcccagtattaggtgtggcgtgtaagagactgagtagctttcttttaaaaggactgtatgagaagaggtgtcctgattggaaagccaggtttcagttaaggcagagaggtagcaagaacatttcccaaggaagttgagggtcgaggacttttagaggagtttctttttttgagacggagtttggctctttttgcccaggctggagtgcaatggcgtgatctcggctccccgcacctctgccacctgaattcaagcgattctcctgcctcagcttcccgagtaactgggattacaggcatgcaccaccatgcctggctaattttgtatttttagtagagacggggtttctccatgttggttaagctggtcttgaactcccgacctcaggtgatccacccgcctcggcctcccaaagtgctgggattacaggcgtgagccaccacgcctggccagagtttcttgattaaagaatgaagttccatgagagtgtatttttccaccctattggcttcatgttatcatcatttaaactttaaaatgtctcttcatcttgataaaagactccagattcatactttattgcttcaagttgctctctgctttacaaactgtttgagttgtctgcatttgctatatatctctgtttcttcacctgtgacttccttctcaacctatttctgtcttgtttctgtcttgccaccatttcagtgaaactgaaaatagctagtgaaaatacgtatgacaatagccaatgtctattttattgtttatcctgtttttgtttaatctcttagcagctgtagtagttgtctatcggctaggtaacaaattaccccctaacttaagaaacgtttattgtttcccagtttttgtaggtcaggaatgtgggtgtggttggtacctatgatgcaggatctcttacaaggctgcagtcatctcaaagctctacttggggaggctgtttccaagctcactcgcgaggcagttggcctcaggtccttgttggctgcttgctggagagatcagtcccttgccatttgggtttctgcatacgattacttaaaatatgattacttaaaatatgatatctcgctacttctgtatcaaaagctctgtcagggaagaggacagatattagccagaatctttttgtaaccttatcttggaagtgatgtgctatcacttgatgtattctgttatcagccagtcactaggtccggcacactcaaggcgggatttcacaatggcgtgaatactgggaggcaaatcattcgtagccatttcaggactgcctaccacagcaacatatgacagaggggacacctctccttcctttgtaaagctccctcttctcttgaggtcttcagagcccttttctgtttttcttgctggttctctgggctctttctctgtcacctttttttttttttttttttttgaggcagagtcttgctctgtcacccagactggggtgcagtggcacaatcttggctcactgcaacctccgcctcctggtttcaagtgattctcttgccttagcctctcgaatagctgggattacaggcgtgcatcaccacgcccagctaatttttgtatttttagtgaagatggggtttcaccgtgttggccaggctggtctggaactcctgccttcaggcgatctgtccgcctcggcctcccaaagtgttgggattacaggcgtgagccactgtgcctggcctctcagtcaccttttgagtcattctatgctcatttattaaatgtttgaatttctttggggtttctcatcactttgtgtttcgtttttcacctatatgctgagtattcatttttatgtcttcagtttttacctctctcctgagtctgaggaccactgtatctaattgccactgaatgtttccatttggatgccgctcaaactgagcacatccagaacagaatgtatgattcctgcacttcctctcgggtttcttaatttgttaaaggacactactgggtgcttaagtggaaatgtatgtggggttcttgatttctccctctcttccaccttccattttactattcctttttatttttttaaagccatggctgttcagtgatggtgtgaatgtttttatgaggtagtgcgtcctcttctaggttgcaggcattgaacctggtgctaggtgatttttttttttttttttgagatggagtttcggtcttgttgcccaggctggagtacagtggtgtgatctcggctcaccgcaacctccgcctcccgggttcaagcgattctcctgcctcagcctcccgagtagatgggattataggcatgcgctaccatgtccagctaattttgtatttttagtagagatgggatttctccatgttggtcaggctggtcttgaactcccgacctcaggtgatcggcctgtcttggcctcccagagtgagtgctaggattccaggtgtgagccaccgtgcccggtccactaggtgatttttaaggttccttccagtcttgagatactgcgtgtgtagctatgaaagacttttgagtaggagatgcatgatcagggctgtgcttcagaaaggtggcaactcttgaacagtcatttttagttgttcaccaaagaatgaacctaaacacctgtattccttttaactttctttattatggtgtgctaagtgatgaatagataatttttatgtgacagcctttttgtatatattatttttatttttttctcattgttatgcatttatgtttggaagcccttttgcatggaagtaaggtaatcaggccaggcgtagtggctcacgcctgtaatcccagcactttggcagactgaggtgggtggatcacttgaggccaggagttcaagaccagcctgaccaacctggcgaaaacccatctctactaaaaaataagaaaaactacctgggtgtggtggtgcatgcctgtaatcccaggtactctggaggctgaggcacaagaattgcttgaaccctggaggcggaggttgcggtgaaccggaattgtaccactgcactccagcctgggtgacagagcgagaccccgtctcaaaaaaaaaaaaacccaatgggacgaaaatttgtgaccttaaattaagtgtctgccatcctggccaacatggtgaaaccctgtctctactaaaaatacaaaaattagctgggcgtggtggtgcacgcctgtagtcccagctatttgggaggctgaggcaggagaatcgcttgaacctgggacgcggaggttacagtgagccgagatcacgccgttgcactcagcctggtgacagagcgagattccatctcaaaaaaaaaaaaaaaattaagtatctctgaaattgtaaaaatttctcaagaaataaaagtcagaccttaaacataattttactgtaggaatataatttatcttttgaaggaattctttcttgaagccattagttatgtatttatttttaattaattaactgtttttttttttttgagatggagttttgcccagactggagtgcagtggcatgatctcgtctcatggcaaccttcgcctcccaggttcaagcgattctcctgcctcagcctcccaagtaactgggattacagtcataggcaaccacacctggctaatttttgtttttagtagagatggagtttcaccatgttggctaggctcgtctcaaactcctgacctcaggtgatctgctcgcctcagccttgcaaagtgctgggattacaggcgtgagccaccgtgcccagcctatttttaatttgttttttagagagagggtctcactctgttgcccaggctggatgcagtggtgagatcaaagctcactgcatcctcaaactcttgggctcaagtgatcctcctgcctcagcctcctcagtagctgggacgactggtgcttgccaccttgcctggataattttaaaaattgttttttgtggagattgggttttgtttttttgcccaggctggtatcgaattcatagcttcaaatgatcctcctgtcttggcctcccaaaatgctgggattacaggcatgaactattgctcccggccttgaagcccttcttgaatgtaacacatatgtagaaaagtatgtaaaacaaaaggaaagctttacaatgtatgaatcagacacttgtgcaaccatgatgtgggtccagcattaggacctcactggcattccacaagctttccttgaagcttcccagtcacagcccagtccttgtctcgtaaaggtaatctctgtcctgattgtaggggaattaccttcttgcttttttctgtgtgtgtagacctttttagtttcggcatagttttgacttttgcatcttcatgtgcatggaatccttcgactcaacattttgtttgtaagatttagatttgtatgcagctgtacattttcattgctaaatagtattctgttgtataaatatactatagtttattatattactgatggatgtttaggttgtttctagttttgggccattatggattatgccactatgactattcttgtaaagtcttttttttttttttctgagacggagtctcactctgttgcccaggctggagtgcagtggtgtgatctctgcttactgcaactgccgtctcctggatttaggcgattctcctgcctaagcctcctgagtagctgggattccaggcgcccaccaccacacccagctgttttttgtatttttggtagagatagggttttgccatgttgaccagactggtctcgaactcctggcttcaaatgatccacctgcctcagcctctcaaagtgctgggattgcagatgtgagcccccgtgcccggcttttttttttttttttttttgagacagtttcgctttgtcacccagactggagtgcagtgttgtgatcatggctcactgcagccttgaccttctgggctcaagtgatcctcctacctcggcctcccaagtaattgggactacaggtgcataccaccatgcttggctatttttttttttttttggtacttttttgtagaggtggagttttatnnnnnnnnnntgggactacaggtgtgagccactgcaccttgccttgtgcacgtgttttagtgcatatgtgtatataattcttttgtgtatttagccagcagtgaaagtcctgggtcgtcggatatgcatatgtacaattttagataattgccaaacagtattcctcgtctgtggttgtacaaaattacatgccccaaagagtgtttgagagttcattttgttccatatctttgccaatacttagtattgtcagtattattaactttaaccattctggtggatttatagtagtatctcttggttttaatctgcattttcacttattactaatgaggttgaataattttatgttggttacttaggaaaccttttgtgaaatgcatattcaaatgtcttgcccaaattttttttttttccttatgggagttgcttatatattttggatatcatcccttctttggttatttgtgttgcaaatatttccacctcactctgtggcttgccatttaagacttcttaaggaggccaggcactgtggctcttgcctgtaatcccaacactttgagatgctaaggagggtggattgcttgagtccaggagttcgagaccagcctgggcaacatagtgaaaccctatctctatgaaaaaaaaaaaaaagaaaaaaaaagaaaagaaatatgttaggaccctgattagaatttaattggatttgtagattaatttgggtagaactacttttttgtaatgtggaatctttgactaattgaatatgatatccctgttatttatgttgtatttcatatctctcagtaatgttttatagttttctgtgcagtattacacatcttttgttaaatttagtcctaagtatctgatggtatcataaatagaattcttttttttttttttttttgagacggagtctcgctctgtcacccaggctggagtgcagtggccggatctcaactcactgcaagctccgcctcccgggttcacgccattctcctgcctcagcctcccgagtagctgggactataggcgcccgccacctcgcccggctagttttttgtattttttagtagagacggggtttcaccgtgttcgccaggatggtctcgatctcctgacctcgtgatccgcccgtctcggcctcccaaagtgctgggattacaggcttgagccaccgtgcccggcccataaatagaattctaagatcaaagttattttactttttttgttggtatgttgaaataaaactgaattttgagtactgactctgtattttgccgatcaagctttataataattttatctgtagattcttttggctttccaacttatataaccatatcatttgtgaacaatgactgttttctgtttttcttcgcaattcttacacctttttcttttcttcactggctaggatttctggcacgttgttgaatagagataggagacgtcattgtcctttcccatctcgaagggaaatcgttcaacttttcattgttaggtatgatgttgtcaagcacacttccacaagacaaggcaaggctaagaccttgcctgtctgatttgactggcagagatagagcgagcctcttcagactcagacagtttctctgttacatcgtcagcagaaggaagaagaagccaaaggtgcctgctccctgtgatctttgtcccacacaccacagcaagaggggctgacacctgcagtgtgggctgtgggtactctgttaatgaggagcctattctggactgctgctaaggggttttgtattctacagctctgctctaagttaggcagggctgaaggttctatgccttgtcagaacccaggatgccatgagaaactgtctcatgacaggttctaaggaaggcagggaagaggggacctgggagctgctctgtatcggccttccaccgtctgctgtcctgggaggatcacagggcattcctcccagactcagataagctgcaggtcaccagaacactgtggtggaactgtttccctacagatgtttgttacagttgcttttgcacatgtcctttattagattgagaaagtttcctcctatacctagatttttattcattagtaaatgttaaaatctgtccaatgtgtttcacgtctattgagattggatgcttttccccgctttcaacccattattatggccaattacatggatttaaaaattcatttctactggttaacaaatttccttcctctcctctcctctcctctcctctcctctcctccctttccttcctttctctcctttctttctttctttcctttctatggagtcttgccctgtcatccaggctagagtgcagtggcgtgatcttggctctgggttcaaacgattctcctgcttcagcctcccaagtagctgggattacaggtgcccgtcaccacgcccagctgatttttgtatttttagtagagacggggtttcaccatgttggccaggctggtcttgaactcctggccttgtgatccacctgccttggcctcccaaagtgctgggattacagacgtgagccaccgtgctcggctggttaacaaatttctaagcatttttttcctttgaaagattttacttacttgaaaaaaaattactgttgatgactttcttccctctggctgcctacctttttctgtgtgtgtgtgtataaatttttatttttttcctcattgttcttatagaattcaggttgctgaacttttcaaggaagaaagaccgtatttaacttctgattcatctttaagaagttgtaattaatggtccgagagactcataggggtttcttctgaagtaagaagcagctatgttttacatcttcagatgccacgtgggtgacttttctaccttcatggtagtattcactttactttcattaaagggaagtcattttgagtacttaaaattggtttccatcccttttctaaacttaaaacgtttttaaagaaatctttatttatttattttcacctggagtctctctctgtcgcccaggctggagtgcagtggtgctatcatggcttattacagcctcgacctcccaggctcaagcgatcgtcttgcatcagcctcccgagtagctgggactacaggagtgtaccaccacacccagctaattttttgtattttttgtagagatggggttttgccgtgttgcccaggctgctctcaaactcctgagcttaagtgatctacccaccttggcctcccaaagtgttgggattacaagcatgagccaccatacctggcctcttttctgaacttttatatgaaatttaggctgtgcctttgcttgatgttattatcccttgcatttagatataaagttattaaacagaaaaagttaccgagggtggataatgattggcgatttcatgtgatttttctggtggttactgtagtcagttttatagcattgccaagtttctggttctgttctgaataacgcgatcgtttcttcttatgctttgggactgatagtttttgtagagcagcggttcttaccgggtttcctgttacttttaaaataaattaattgaaaatgggcataaattatttgttaagtttgaacttgacaaatgcaggtaaagtataatgatattatatttctgtacagcaagtatatacatatacatagatattttaaatcaccaatcaggatttccttccaaagttcagaattaggttttgattcttaacagtttatattataataattgttattattacttttttttgagattcttaacaatttatattaaaattcttattaccttttttttttttggaagcagagtctcgctctgtcgcccagactggagtgcggtggcgcaatctcggctcactgcaacctccgcctcctgggttcaagcaattctctgcctcagccagtagctgggattacaggctcccgccaccacgcccggcttatttttgtatttttagtagagacggggtttcaccacttggccaggccggtcttgaactcctgacctcgtgattcacccaccttggcctcccaaagtgctgggattacaggcatgagccaccgcgcccggccagtattttttttttttnnnnnnnnnnnnnnnnnnnnnnnnnnnnnnnnnnnnnnnnnnnnnnnnnnnnnnnnnnnnnnnnnnnnnnnnnnnnnnnnnnnnnnnnnnnnnnnnnnnnnnnnnnnnnnnnnnnnnnnnnnnnnnnnnnnnnnnnnnnnnnnnnnnnnnnnnnnnnnnnnnnnnnnnnnnnnnnnnnnnnnnnnnnnnnnnnnnnnnnnnnnnnnnnnnnnnnnnnnnnnnnnnnnnnnnnnnnnnnnnnnnnnnnnnnnnnnnnnnnnnnnnnnnnnnnnnnnnnnnnnnnnnnnnnnnnnnnnnnnnnnnnnnnnnnnnnnnnnnnnnnnnnnnnnnnnnnnnnnnnnnnnnnnnnnnnnnnnnnnnnnnnnnnnnnnnnnnnnnnnnnnntttatttatttatttatttatttttttgagacggagtctcgcgctgtcacccaggctggagtgcagtggccggatctcagctcactgcaagctccgcctcccgggttcacgccattctcctgcctccacctcccgagtagctgggactacaggcgtccgccacctcggccggctagttttttgtattttttagtagagacggggtttcaccgtgttaaccaggatggtctcgatctcctgacctcgtgatccgcccgtctcggcctcccaaagtgctgggattacaggcttgagccaccgcgcctggcctctggccagtattattactattttttggaacagatttttctcgctcaggatggagctcattgcagcctcaaattcttaggcttaagcgatccttctacctcaaccttccgagtagctgggactgtaggcacgcaccagcatgtctggcaatttttctgttttttgagacagggtgttactctgtcacttaggcgcaatttcagctcactgtagtcttgaccttccactcttaagcgatctaccctcctcacctcctgcatagctgggactctagggttgtgccaccatgcccagctcatttttgtaattttttttgttttgtttttaagagacagggttttgccatgttgcccaagttggtctcaaaaccctgggctcaagtgatccccccgccttggcctcccaaagtgctggtattacaggcatgtatcactgtatctggccttttcttcttcttatttttttttttttttttttgagacggagtctcgctctgtcacccaggctggagtgcagtggccggatctcagctcactgcaagctccgcctcccgggtttacgccattctcctgcctcagcctcctgagtagctgggactacaggcgcccgccacctcgcccggctaagtttttgtatttttagtagagacggggtttcactgtgttagccaggatggtctcgatctcctgacctcgtgatccgcccgtctcggcctcccaaagtgctgggattacaggcttgagccaccgcgcccggcccttttcttcttttaatagagacagggtcttgcagtccaggctggtcttgaactctttggcctcaggcgatcttctgcctcggcctccgaaagccctaggatacaattcttctaaatagtatagcaaaaaatatctgctttataaatttttcatttttgtagttgttcaaaagtacacatgtatttccttttttctttttttgttcctcattcaaaaaatatggaaaatctaatatacagtatatatgtgtgtatatataatgtatatatgtgtgtgaatacatagcatatataatgtatatataatatatagtgtatgtgtgtatatgtagtatatataatgtatatatgtgtatatataatgtatatgtgtgtgaatacatagcatatataatgtatatataatatatagtgtatgtgtgtatatatagtatatataatgtacatatgtgtatatacagtatatatatagtgtatatatagtaacatagtatagtctgtgtatatgtgtgactctgtattgtgttccatcttggcagtacgatgttcgaggccctgtctccgccctcaggatgctggtgaccagggagggagacagtaaacaggcagttacagtagagtgtgataagtgttaatgatatgtgcaagaactagaaggtttaagggagtggcgaaagaggctggaaattgggtttggatcatgaagggctttgtaaaccctgttgaaatctgacttttaccttggggcaatggcaagactggagacttttgagtaaaggaaataacagttgtatatttgtattttacaacaaatggataagaggaggctaagtgaggaagccaactaggaggctgtggacttgttcccactgaagcctgaacactgaagtagtgacagtggggacagagatgcatacagagttgaaaggtttgacaggactgggtaattctctctctctctctctctctctctctctctctctctctctctctcactgggtaatttttttcctctctctctctctctgtgtgtgtgtgtgtgtgtgtgtgtgtgtgtgtgtgtgtgtacacactttgtggggaaaggacagttgatggggaggaagaagactaaggtgactcccagactttcagatggaacccctaggctaggaacgatgctgttgggtacagtagccactagccacgtatggccattaaggtatgtctaaactaatttaaataaaataagatttaaaaatcggttcttcagttgcacaaatatagaatggcagactcttaaattgtgcagatttagtccagagtattatgaagttataaattcaacagtatccgcagagattcaagcagaaaataatacctggctgtgtttaacagcagtgtgggactagcggcctctgtgttggacagtgcagatacagaacgtttctgttacagaaagttcagtgggacagcagtggtctgcagtttttggtttctcctttcttttccccccagaggaaagtcagaataacaggtggttttctctagtctcctaagaattttggttccacaatattctgttgtggggtattgttagccagggattctgctagataccatcctgctactgtcagccaccatcacccagtcatcagaataggacgtctctgtaatcagaaggttcttttggacagcactgagctagagagatggtgatgtcattcactgagctagttgtggtgggggacaacggtagccgctagaaagcactgcttattagaaataggagccacatatgtaattaaaaaatttttagtagccacattaaagggtaaaaagaaacaattggattttatcttatttaacacagtatgtccaaaatatgatttacagcacatttaaacatttaaaaattattgatctatttacgtaaattttaaaaattttttcgagacagggtcttgctgtgttggccaggctggtctcaaattcctgggctcgagtgatctgcttgcttcagcctcccaaagtgctgggatcacaggtgtgagccacattagtttttaatagtagatctttgaaatgaattgtatactttcatagtatatcttaattgaaatgctaagtttttttttgttctttcgttattttcaaatgctaagttttatcagaaatatttaatccgtatttatatctgtaaatcataaaatttacagttgaaaaagtagatttacatgcccaggttattccaaacatgcttaaaacttttccagtaatgtaattaagtatcggtttttaaatttaagtttcaattccatgaaataaggttaaaaattcagttcctcagtctcactagccacctttcaagtgctcagcactcagcgtctacatatggctagtggctaccatattggacaacacagctctggaataactgctcactggatggttggaaattcaggtctggagtttaggaaagaggtagcaaaacagaagttagaagggaagaactgtgaggaacatggggattaaaaaaaagtttgtgactttgaacaaaccaattttaatcttggtgctccacttaaaatcgataaaagcatcttggtgagagtataatagtagatgaatatgcattatcttgtagtggtaaagattttggctttagagtttgatagagctctgtgatcttgggcaactttctgggtctaataaaatctttctccttgaaagggatttgctgttggggttaaatgaagtattgtgacaaatgtttactgcatgtaataccgtatttttttacttttaagttgctatttctttttggtggggtgtaccatcaacttaataattcattctttttagggtaaaagaaatataatttagttatacatgttaattataagctgtatcccaattcagaaactttaaaatatgaaaaactgttcatcttaaaatattaatattgatgagtgttcattataaactagatactgtgttaaatgctttatatagtgatataaaaggtttgatttttataaatatgcaatgtaatatgatatttctgttgtaaagtttcatttcagtaaattctgtaatacaaatttcttatacttctggaaactttaaaatgcgtgatggtttaactcctttcttagttatttcagggacccctgaattctgcttgaatctctttggatgcttttaaatgtatgatttctccaggctaaatctgcagaatttgagtctgtaattctaccgtagtgagtacgcatataaagaattactatttaaaaaactgccttggtagagtttattcagagaggcgaggcatggtaaccgaggagaggaaaatggacttttccagatcgaagagaaaggaaatattggctgggtgctgtgcttacgcctgtaatcccagcactttgggaggccaaggtgagcggatcacttcaggtcaggagttcgagaccagcctggccagcatggtaaaaactcatctctactaaaaatataaaaattagctgggcgtggtggcgggtgtctgtaatgcctgctattccggaggctgaggcaggagaatcacttgaacccgagaggagaggttgcagtgagccgagatcatgccactgcgttccagcttgggcgacagaggaggactttttctcaaaaaaaaaaaaaaaaaaaaagaaatatgatttttcttttttttttttttttgagacagagtttcattcttgtcgcccagtgcaatggcacaatcttgtctcactgcagcctccgcctcccgggttcaagtgattctgagtagctggaattacaggtgtgcaccagcacacttagcaaattttttttattattattattagtagagacaggtttttaccatgttggccaggctggtcttgaactcctgacctcagctgatccgtccaccttggcctcccaaagtgctgggattccagacgtgagtcactgagcctggctggctatatgaattttaatgctctgcaaattcttttctttttttggagacagagtctcgctctctcgcccaggctgaagtgtagtggcgtggtctcagctcactgcaagctcctcctcccaggttcacgccattctcctgtctcagcctcccgagtagctgggactacaggcgcccgccaccacgcccggctaattgttgtatttttagtagagacggggtttcactgtgttaggatggtctcaatctcctgaacttgtgatccgcccgcctcagcctcccaaagtgctgggattacaggcgtgagccgctgcaccaggctgcagattattttctgcggtctttttcttaagtctcatcttctggcagtgtgccattccaccagtttcttggagaagacaagaaacgtgtttgtaatgcttacccatgcatcatatacacggtgtactaggaaatcttactgccttttttgtggtagtgtcagcatacccactcaggtctgaaataatattaggcattttacatctgtattattggaaataatgaaaaatcttatatgtgccaagtacatttggtgatagcagctgcaaagtgctgtgttgaaaatgactttgaaactaggtacaaaaggacgaaatgttcaccctggaattacagtgactttccttttgtttctgtttaagtcttcttaacatttttcctttcttttgttttttgaggcagggtctcactccgtcacccaggctggagtgcagtggtgccgtcacctctcacattcacagcagccttgaccttttgggcccaagctgtcctcctacctcagctcccaagtagctgggactactggcatacacccccacgcctggctaattaaaagaatttttttgtagagacagggtctctccatattgcccaggttggtctcaaactcctaggctcaagcgatctgtctaccgtggcctcccagagttctaggatataggtgtgagccaccttgtttggccaagattttcctttttaaataagtagtgtttacctgtttggaaaattttgacaactgttaggaaaaaactaggtttcgtctcatcttttggctctgcttatatttgcaaaattgagagtatactgtacattaaaatatattcttgaaggccaggtacagtggctcatgcctgtaatcctagcattttgggaagccaagttgggtggatcacctgaggtcagtagttcgagaccagcctgtctggttagcctggctaacatggtgaaaccctgtctttcctaaaactgcaaaaattaactgggtatggttgagaatgcctgtagtcccagctacttgggaggctgaggcacgagaattgtttgaactcaggaggcggaggttgccatgagtggagatcacgcccctgcactccattgtgggcagcagagtgagactctgaaaaaaaaaaatatcctttttcattattgtattataaacattttttaaatggcagacattggtttgtaaatggtttttgtaggcttcatgttaagtcataaatatttcacttaaacattcctcaatgaaatgagtactaataaagctggtatatctttataaacttttctctacattttggatcatttgagtagattggattttcctgttcatagaattactggatcaaaagatacgtttttaggacccttaccagaaccgttttcaaacttgctgcttctcagatacttttattgttttcgggaagaaacaaatacttactgggtacctataatttttcacttaaacccttttaaatttatgtttcagacatgcaaaaagatatagagaattatgtaattaacatctgtgtacctaccacctagcttaagaaatacacagttacagagttaaaattcctgtgccgctcttcctgattataaatgtctgtaattaccagcagtgatgtggatatttaatctttttttttttttttttttgagacaagagtcttgctctgttgccaggctggagtgcagtggcgtgatcttggctcactgcaacctccgcctcctgggttcaagcgattctcctgcctcagcctcccgagtagctgggactataggcacgtgccaccatgcccagctaattctatctttagtagagacgggttttcaccatgttagccaggatggtctcgatctcttgacctcgtgatctgcctgccttggcctcccaaagtattgggattacaggcgtgagccattgctcccagctgatatttaatcttaaccattaattcaggtctgcatccaagatcctttggaccagaattcagaatttttttcagatttttagataagtgatatgcatatactatatataacctaacttttcaagcatgttttgggaatggtccctcatttcttcatcaaacactttgggattactgacccagtccaggtctggttttattaccatattagttacacatttttggatttttagacatttttgttattcagacttgtgaataaaggtttgtgaacaggtacatctgttttactttgttcagcttaatcactctggtagaatttgttgaactttttgttgagctgatcacaatgtagtatgagatgtataaaatacaagataacgtaattttatgtccaaacaatttaatattttaggattttatgaaatcaggttatcggtgagcactgcggtcgttggagaaggctacacaacctagaacttgacttgtttcaactaagtggcgcagattgctgttataactagagaaccactatggttaacaaccttgtgtttcttttttttttttttttctcgctcaggctggagtgcagtggcgtgatctcggctcactgcaagctccgcctcccggggtaacgccattctcctgcctcagcctcctgaatagctgggactacaggtgcccgccaccgcgcctggctaagtttttgtatttttagtagagatggagtttcactgtgttagccgggttggtcctgatctcctgaccttgtgatccgccctactcggcctcccaaagtgctggaattacaggcgtgagccaccgcgcccagcccaacaaccttgtgtttatttctaagtatctagcttgacaaaatatttgtcatgatgagaactttgagagaacttataattaacttgattaactgataagaagtattaaaaactgcagttaacttgattgtaaactgagttacccttgcattagaggtgaatagtatctgacaggtgttaagattgctcctttacaaattgctgctccaaacagaggtggcctttcagataggtttgccctaaaacagtgctgctttagccacactgttgtatagttttagtctctagtcagtattggagaatcagattaaggttacacaactagatgcataatgttagcaaacttaatacattttagttacatgttgagtgtagaagcagagaaatctgtgccttcattgactcgtagatattttttcccctcctttcctttcctttcctttcctttcctttcctttcctttcctttcctttcctttcctttcctttcctttcctttcctttcctttcctttcctttcctttattttccttccttcctccctctctctctccctccctccctctctctctctctctctgtctctttttctttttcttttcctttttcttccctttccttccttttcttcctttctgtctgtctttctgtctttcctgttggtcctcgtttgtcacccaggctggagcatagtgatgtgatcataggttgctgcagcctcgaactcctgggctcaagttgtcttgctgctacagcctcccgagtaactagggctaaaggtgtacgccaccacacctggctaattaaaaaaatttttttgtagagacaaggtcttgccgtgttgcccaggctgatctgaagtgatcctttcaccttggcttcccaaactgttgggattataggcgtaagccatgtgcctggtgatttttttttttttcaactctcctgctattacagaggtattagcaatcagtgttcgtgcctagcccactaattactgtgtaaattagtgctgaatggttgtggaggtctttatttaaacctgtagtatataatgagacttaaaaaaaatacaagtttttttttttttttttttttttgagatagggtttcactctgttgtccgtgctgggacgcagttatgtgttcttggctcactgtagcctctgtctctggagttcaagcaatttttatgactcagcctcctgagtagctgagatcataggcgtgtgccatcatgcctggctaattttggtatttttggtagagacagggtttcaccgtgttgccgaggctggtctcgaactcctgagctcaggagatccacccaccttggcctcccaagctgttgggattacaggcctgagccaccgcaccacgccaaaaaaaaaaaaaaaaaaaaagtaaaagtaatacatgctcactataaaaagaaaatggaacagaagaaaagtatataagtaaagaaaaaggtgattccatccggtttttcagaaataggctgttaccatacaattcatacaaatatatatatatgtatgtgtatatacaaatatatgtatatatatcctttgtactcaaatgagagtgtcttgtaagcattcttctacaactttttttccacttcacagtatgtttttgcatgtcaaatatagatatttacttaaatattttgtttattttggtttcttttacctctttttgaaacgaaatctctctcttgccacccaggctggagtgcagtggtgcaatctcagctcactgcaacctccgtttcccaggttcaagtgattcttctgcctcagcctcccaagtagctgggatcacaggtgcacaccaccatgcctggctaatttttgtatttttagtagagatggagtttcaccatgttggctaggctggtcccgaactcctgacctcaagtgatctgcccgccttggcctcccaaagtgttgggatcacaggcatgagctactgtgcccggcctctttttcttttttctttttttttgagagagtcttgctgtgttgcccaggctggagtgcagtggcatgatcttggctcactgcaacctctacctctggagttcaagcagtcctcccacctgagtaactggtactacaggcacacatcctgtaatgtgtaagttttgtattttttgcccaggtaagttttgtattttttggtagagatgggaattcaccaggttggccagactggtcttgaactcctgacctcaagtgatctgcctgcctcagctttttaaagtgctgggattacaagtatgagccaccatgcctggccattgttttactttttttttttttttttttaaatcaggattgtctgaaagacattttttttaaacagcagcattgtcttttacagttgagagatacataaatttattcagctaatctcctgttggaaatttaagctgtctccttgctggtacagacaacgcaataattgaatatcattgcacattatgtccttgaacctgtgaaaatatattttatggagaatactttttaaagtgaaacttctagttcaacagcgtgcacattttaaattttgatagattatgccaaattgtacttcagtgggattttaaaattttggtctattgttcatgttttcacagggaacctaggagagcagcatatttctcatccctagtagtatttataaataaccctttaagaaaatgaacaggatctttagaaatgttgaagtacagtattaaaaatatttgactcgttgatgagcataaccccattacatcaggttggactagtaattttgagatttacatcagaatttcacatataattatttaaatagctaataggtggtatattaaattttctggttcaacttataaatatcatagcacatctgtgtcagcctagtcaaccgtagttaatttgaagtaagctactgtgttgctattaaagaattttttgcttttatccaccgggcgcggtggctcacgcctgtaatcccggcacttcgggaggccgaggcaggtggatcacgaggtcaggagatcgagaccatcctggcaaacatggtgaaaccttgtctctattaaaaaaaaaatacaaaaaactagccgggcgaggtggcgggtgcctgtagtcccagctacttgggaggctgaggcaggagaacggcgtgaaaccaggaggcggagcttgcagtgagcctaggtcgtgccactgcactccagcctgggtgacagagcgagactccgtctcaaaaaaaaaaaaaaaatttgtttttgctttcatttgtcttaagaatatttggtgttcctttggagactcagttcgtaaagagctattatgatttttctagtctatgaggagagagagagtgctgtctgccgttgcatgttatgcttgtagctatttgggggaagagtgagaattaaaggctaacatacaatcattgtgggtagaagtattcttatttttagacctctgagtataatggatttctgtggggtgaggtgagactggggctgtttttctctcacagtatgtatataaccattgggatcagtgctttgcttttcttttttttgtttttttttcagtacacagtttcactctgtcacccaggctggagtgcagtggcgcgatctcggctcactgcaacctccacatcctgggttcaagtgattctcctgcctcagcctcctgagtagcttgggttacaggtaagtgccaccacgcctagctactttttgtatttttagtagagacggggtttcaccatgttggcctgctgatctcaaactcctgacctcaggtgatccacccaccttggcctcccaaagtgctgggattataggcgtgagccactgtgcctgtcctgaatattctttgtgtttttttctgacaggctttgtgatgtgaatagtagtgaattgatagtgaaactgtattgttaataaactcataatttaagataaggcagattactggtaatattcttctcagaattagattttaggaaatttctctaaatgtaaatcctggaaagcttgcagagatttaaatgctgttctggtattttttttttttttttttgagatggtgtcttgctctgtcaccaaggctggagtgcagtgacacaatattggctcagtgcaacctccacctctcgggttcaaatgattctcatgcctcagcctcccaagtagctgggactagaggcacgcgctaccatgccctgctaatttttgtatttttcgtagagatggagttttgccatattggccgggctggcctcgaactcctggtctcaggtgatctgcccgcctcagcctcccaaagtgctagggttacaagagtgagccaccacgcccagccatatggtattttttaaaaactcaaaatatagggtacaaaattcatcttaagtgcttggtacatctttagcttggtaggtctttgacatagagttttaatagagtttttttagtattgagaacccatttgtccccacagacatgatattttctgcatgtgattgctctgtgtgtgtgttcatttttaatttctgtcttagacgagaggcattagtccgttgagcttatgccatcttcttggaattaagatttcgctacagaagtttgcatttttactaatgcaggaagaacagttttttaaaaaattgaaatcttgcccatttagttaattattttcaggggatagatgacaaaaataaatagcaagacatgtacagaaggaggttgtcggttcatggaattagttttatttatttgtttgtttgtattcagagtctcactctgttgcccaggctggagcgcagtggcgtggtctcagctcacggcagcttccacctcccgggtccaggcgattctccaagtgactctcctccctcagcctgtggagttgctgggagtacaggtggcgccaccacgcccggctaatttttgtgtttttagtagagacagggtttcaccgtgttagccaggctggtctcgaactcctgacgtcaagtgatctgcccgcctcggcctcccaaagtgctggggttacaggcgtgagctaccacacctggcctaattcatgaaattgggatactgtttaaagatagagaaaattttaacttgaggaaaatgttaaaaaatgcaatcattatatttattttagattacatctaattgcaggttccgtaaactacattcaagattattactactttttaaatgtatgtgaactatctaatgatttttacgtggatttagattaattgtggcattggcaaacacttattgcttgatttgtgttagacactgtgctaggttttggagatgaagtaagacattcctttacttttaaggaagtgattaaaataataattacattattttaaaagcccctggttacctcagaggaccacctaaattagactgagggtcatgaaggtttgtgcaggattgtgactgttgaacttggtttggaaaaatgatcagtagttagccagttaatggggcaaaagaaggtcatggaaaccagagacagcttgctatttcagggaattgcatagacctgattatggttgtcacatggagaaggagagtggataaggagtagcttcagagagataggcagggccaagtgataaaaagtctcatatgcactaccaaggaattcagattaaaaaaaaatattttttgagacaaggtctggctctgtctcccaggctggagtgcagtggcgtgatctctgctcactgcaacctccgcctgttgggctgaagttatcctcccacctcagcctcccaagtagttgggattacaggtgtgtgccacctggcctggctaattttttgtatttttagtagaaacgggatttcgccatgttgctcaggccagtcttgaactcctgagctcaagtgatcctcctgcctcgggttcccaaagtgctggggttataggtatgagccaccgtgcccagccaagacatttttaaaatgtgggaatacgcaagcacacgttccattacctgtcagtgggatcttgtcacacgtcatgtagctctggaaaacacttatgcactcgtgagagaatcacaatgaaaaaggccaataacgtcatcctgttatgaaaatagctttgccctcatggacctcctgcaagggtcataagcacccctggaatcccttacccatttggagaatcatcatattagaagatcgttatggcactggtgttgagaattgtttagaacttataaaaagaatcacatttagttttgcttttttgagacagggtcttgccatgtcatccacggcatagtgcagtggcactatcatgactcactatagccgtgaactcttggtttcaaggaatcttcctgcctcagcttcctaagtagctgggactacaggcatgagccactatgctgggctatttttttttttttaatttttttgcagagatgggatcttgctgtgttgtccaggctggtcttgaactcctagattcaagcaattctcctgccttagtctcccaaagtgttaggattataggcatgggccactgtgtctggccaagaaggacattttatattgtgatccaatatgcacaccttaaatattgcagaaaacaagactatattatctcttgctgcattacaagttacttcaaaacttactggacttaaagaacaaacatctggctgggcacagtggctcatgcttgtaaccccagcactttgagagaccaaggcaggtggatcacctgatatcaggagtttgagaccagcttggccaatatggcgaaactccgtctctactaaaaatacagaaattagcagggcctggcggcacattcctgtaatcccaggtacttgggaagctgaggcaggagaatcgcttgaacctgggagacagaggttgcagtgagccgagattgtgctactgcactgcagcttgggcaacagagtgagactccgtctcaacaaaacaaaaagaaacaaacatctcagattttatgaagagtgtgtattgggtgattctgactcagggtctctagtgaggttgcagtcaagatgtttacactcatgtcaattcttgactgagattggagggtctttgaagctatctcacgtggctgttggcaggaagcctcagttcctgaatatgcaactctcttcacagggtagtttgaagtttgagtatcctcatgacatggcagctggattcctgagagagagcggtttgagagagtgaccaagacagaagctccagtgtcttttaagagttagtcatgaaagtacgtcattggaagcaggtcactaagttcagtctacactcaaggagaggaaatttactctccctcttaaaaggaggagcattaaataatttatggacatactttaaaagtaccacaaataattgtcaggagaatgaatctcccatgagcttcctatttcttttttttgagttggagtcctgctctttcgcccaggcaggagtacagtggcgcagtctgggctcactgcaacctccacctcccgggttcaagcgattgtcctgcctcagcctcccaagtagctgggattacaggcgtgtgccaccatgcccggctaatgtttgtatttttagtagagacagggcttcaccatgttggccaggctggtctcaaactcctgatctcaagtgacccgcctgcctcagcctcccaaagtgctaggattacaggcatgggccaccgcgcccagccgagactcttatttcatatacaccctgctgagtgtgctaggaatgcaagcagggcctcgactgttcctaacccaggccatttttcaggactgtgtttgcagcaggccactttgcgggaggaggtgatgtctttcatcacaaggattctggccggacacggtggctcatgcctgtaatcccagcattttgggaagccgaggcgggtgggtcacgaggtcaggagttcgagaccatcctgactcacacggtgaaaccccgtctctactaaaaaatacaaaaaaattagccgggcgcggtgtcgggtgcctgtagtcccagctacttgggagtctgaggcaggagaatggcgggcacccggaggcggagcttgcagtgagccgagattgcgccactgcactccagcctgggcaacagagcgaaactctgtctcaataaaaacccaaaaacaaaacaaaacaaaacaaaaaaaacggtggattccctaagcccaatgttccttagccgtgatgcaaacccgctgcatgtcaccttatggaacttgggggtaacagggagacagtgcaaacatgctcatgcttgctgtgctgtgagttctttttaaagttctttgtgtttgacccaggaggctcatgtgttctgtcagtatccatgaaatggtcataggccaaggtattaacctgtaagtagggttaaataaaaccctagttccttcacagttctcaacaatgcttatgtttactttagtgtgatgcactgtgaaaataagctatacgttttattttcagttctatttatctgtttattttagagagcctatctctattctcctagagataggatcttgctgtgttgtccaggctggtcttgaattccttgactcaaacaatcctactgccttggtctcccaaagtgctaggattacaggcacgggctgcagtgcctggccaagaagtaccttttatattgtgatccagtatgcacatgtgcatgcatatgcactcctgaaacattgcagaaaatagcacaacactaccatctcttgttgcgttacagttacttcagaacttactgaatttgaaaaacaaacatctcagatttcatgaagagtgtgtcgggtgattctggctcagggtatctagtgattttatttcatttaaaacaaacaagaaaacaagcttggtcgcagtttatcaagctgatttcacaacctactattgggtcataattctaagtttgaaaaacagtgattaggggactgatacggtttggctgcgtcccctacaaaatctcatcttgtagtttcaataatccctacatgttgtggagggacctggtggcaactgaatcatggagtcggttactctgtgctgttctgatagtgagtgcccacgagatcgattttttattttcttttttgagacaagagtcttgctctgtcacccaggcctgagtgcagtggcataatcttggctcactgaaacctttgcctcctgggttcaattgagcatgtctgggtaatatttgtattttcagtagagacagggtttcaccatattggccaggctggtcttgaactcctgatctcaagtgatccaccgaccttggcctcccaaagtattgggattacagacgtgagccaccgcgcccagcctagatctgatggttttataagggtctctgccccctttgctgggcacttcttcctgctgccatgtgaaggaggatgtgtttgcttccccttctgccacgattgtaagcttcctaaggcctccccagccctgcagagctgtgagtcaattaaacctctttcttttgtaaattacccagtcttgtgggcagttctacatggagcttgaggatggactaatacaggactccgaggctagaggcaggcagtcaggttagaaagttgttttaattcaggtaggagaggatggcgtaaaccaaggtactaattgtgggaatggaggaagagggtcaatttaagaggtatctggaaatcaaagaaacaggaattgtatttttttgataatatgtgtatatatggcatatgaaaatttcggaaggacactcaggctctggcttgagcagctgatgttattcatttgaatagatgttgtccactgccctgttctttttttttattttattttttttccctgcagcagcagatttggttatggagcggggagaccttggtgtggaattcagtttgggggcaggtgtgtttgaggtgcatgtgaggagtataagtgaagatgtccagaagtggaatacatagttctgattctcaaaggagaagtaaaaaagtactggagaagtagtaaatttggagtctttgttgtacatatgttattttaagctggtggaggcagcgagaaaggatttcttaaggatgatattgtagtgtgagaataacatagggataaagatcagaaacatttaagggaggaacaaacaaaggaggaggagggttagaagaaaagagcatatgatattaaaaaaccaagagaggagagtgtcaaaaaattgggagtgcttaagaaacagagtatatttatagacggaagttaaaaaggcattagagaggaaaagcgatcattaactaaggtttctctggagaagccagagggaatagggactaaagtaccctgtggaaggattatctgtagcccacttccagcagaatagaggaagttaaggatggttgttgctgtaaatgaacatgtggtgagaggaagttgagatagttcttgtttgatttctctgtttctctctaatgtaggaggtgagatacataaatttggtagggctgtcataagaaagggctgtcatcagctgggcgcaggggctcacgcctgtaatcccagtactttgggaggctgaggcaggtgaatccctcgggcctaggagtttgagaccagcctgggcaacatggtgaaaccccacctctaccaaaaatacaaaaattagctgggtgtgctggtgcttgcctgtagtctcagcttgtagtctcagctactcgggtggctgaggtgggagaagtgcttgagcctgggaggttgaggccatggggagctgtgatcctaccactgcactccagcctgggtgacagaggagaccctgtctcagcaaacaaaaacacaaaacatctcccactcctccacccccacacacaagaccactgatgatgtggcttaacaacaatttctttttttttttgttccaagacagtctcactctgtcgcccaggttggagtgcagtggcgccatctctgttcactgcaacctccgcctcccgggtccaagtgattctcctgcctcagcctccggagtagctagaactaccggcacgtgccaccatgcccagctaatttttgcatttttagtagagacagggtttcaccatgctggccaggctggtcttgaacttctgacctcaggtgatccacccattgtggcctcccaaagtgttgggattgcaggcatgagccatcgtgcctggcacaagaatttattttctcataattctggaagctataattctgagacaaaggtgtcggcctggttggtttcttctggaggccgatctctctgggttgtacatggccgttttctggtgtcttcacatggtctttcctctgtgcttgcctgtgtcctaatctgtttttatagggatactagttatattggattagagcccaccccagtaccctccctgagccttcattctttaaggaccctatctaaaatatggccacatcctgaggtatgggggttaagacttcaatttaggaattatggattaggggacacaattcattaaaatgacgaagtcatttgctgaaagtgagaggccgaaggccgagatttgaaataacccaccataacaaatattgcataggaagctaactaagagacttgtggggctctgggagagaaacatgggcccagctgaggtaggaaatcaaactgaacagctgcatgattttctctagcagcatctgggactctaggtatataaatcaatcactaacggtgtttctcttgacttaatttagagaaagagtttaaaatatgtgcattttcccccaaacttttgtggtatattttatatacaatcattgcacatatttaaagtatacagtttgatcagttttaacatagatatatgcctgtgaaaccatcatcccgaacacaatagagaacatttcagtcacccccaaaagtttctcctgctcctttatgatccgtgcctccctctacccagtccctagtcgtgtacttagtaactttctgtcataataaatctagaattttacataaattgagtcatactgtgtgacttatttggtcatatttttggtcagattgtttaaagtgcaagaattattattttgtggctttattccatatttttaaaaagaatttttaaaaaacaccgtcttccctgaagctcatgagattaaaaagctatatgagggcttccctcagatatgactggtgaattccttcccttgtcctctaaatgaatatagttctgaaaataacagactccacttggaaataccattttggatttgaaagtgacttgagtattagagtgcacctgctggtgttgaaaacaatgtggatttttgttactggatcttagcctctttcatgtgatttagtccctccactacgtggaaatagttccggatcttagcctctttcgtgtggtttagtccctccactacgtggaaatagttccgcacggcggcggagttggattttttttttttttttttttttttttttggtgaatgtggcagtttaaaattctcatggtgtgattcctgaaactcttgcgtttctgaattattttattgtttgacttattttgttctgcctaccatcttttaaaaaagactttctcctacttaatagaaagatataagtgattgtttaagttttacacctgggaagatctaagacgtaacctaaagtttagagtggtaaattagtaggatacgctaccttaaaattgtgagaacctttaatatcctgcggacacttgagacgttaacatcagcagatgatggtggttaagcatgatagttaacagcctgcagggatctggaattaggctgccttaattcaaatctggaccctaccatttaatagctgtgtgtctttagataagccacttaagccgtctaagcctcaactttctttatctgtcaaatggaaataatgacaggacccatcttattcacacacaatactaaattatacatgaatattgaatatttaatataaatattaaattttataaaactcatagtacagtgcctggcatatgaaacacacactcactaaatgttagcttttgttatcattgaaaggattccagataattaatggctcccttattttatgtaatattcaaattacttaaaaaaagaaaaaactttgtatccctcttcgatcttgaaatagaattcatctgaagtagtgatttgtagattactacctgtcacccattttacagtccagattactcatgaaaaggaatttttacttcatgagctagcttagtcctggaaagcaatttcgtaacattactaacaaaatattgccatttctgaactcagtgtgccgtagcaatttctgagatggagggagattggagtctttccttaaagggtcaggttctgtgtatttcttgtcttgtttgttgttagcgctgggctttgttcactggttcagtaatacagagatgagaccgcctgtgtgttcacatttttgaggatttttttttttttttttttttgnnnnnnnnnnnnnnnnnnnnnnnnnnnnnnnttgtcctaaactccagggctgaagcaatcctcctgcctcagcctcctgagtaggtgggacttgcataacaatggatttttggaaaatattgtttaatatgctgaagcctgttgttccttgacctaagccaattctttgaaatgatgccaagaaatcagagagagctagtttagatctgtattgtctttgaaagaagtgtataaagttgatagctatagtatagtgggttctgcatccacagaactaagcaactgtggaccaaaaatatttgggaaggaattttaaagtcaccttgaaaaaaaaaatagggaggaaaaaaaaacttgggaaaaataatacaacatggaaaaataataaaaataaacacagttaagtataaccacgatttacatagcatctacattgtacgaagtattataaggaatttagagatgattcaaagtgtattggaggatgtccataggttttaggcaattactgtgtcagtttgaatcagggacttgagcagcttaggatttttgctgtctgggagggtcgtggatatctggatacgttctgctggagccagtccccagcagataccaagggacaactgcctgtggttttaaaatttgttttaattatacttgtagagtatgaacatgttttcttttttggaaaaaaatttcaggtgctttatggtcgtttgagtataaagctttataagttgagttaaagccttcacaaacatttttcccctttacaacacaagttgccttccctgtaattattgctgtttcaaaattggcatttcccatgtaggaattctttacatactctgtttacagatcattatactatgttgtctgtattttttacctagcttttggtttatcttttaattttatttacagcattttttggtataatgctttgtcattttgacataattaagtgtattggttgtttttctttatggtttttgcttctggttttttatttaagaagccttttcctaactcaagttcacaaggatattcttcaaaattttcttctagtacttttaatggtttaaaaaatttatatctttaacgtatatggaatttattttggtgtactatgtgaagacgagtatacttaattgttctcgaagagcaacaagtatttaagcctcatttattgagtgatttttcatttcctcactattagtctgttctcatgctgctaatacagacatacccaagactaggtaattttaaaaggaaaaatttttttttttttaaatttagacggagtctcgctcttgtcacccaggctggagtgcagtggcacgatcttggctcactgcagtgtccgccacctgggttcaagcttctcatgcctcagcctcctgagtagctggaatttcaggcacctgccaccatgcttggttaatttttgtgcttttagtgagatggggtttcgccatgttgatcgggttggtctcgaactcctgacgtcaggtgatataccctccttggcctcccaaagtgctgagattacagatgtgagccaccgcaccctaccaggaaagaggtttaatggactctcagttccatatggctggggagacctcacaatcatggcagaaggcgaatgaggagcaaaattatgtcttacatggcgacaggcaagagaacttgtacaggggaactcccatttataaaactatcagatcccatgagacttactaccgcaagaacagtaggggtaaactgctcccatgattcagttaagtacacctcgccccacccttgacacaggaagattattacaattcaaggtgagatttgggtggggacacagccaaactatatcactcactgttttgaaatattacttttaacatatattaaatttccgtatataatttagaccctgtttttgggctagtactatacagttttcattactatagttttacaaggctacaatactttatgagaaaccttgcaggtcagatgtgattttgtagtcaggaattttttccagtaatacttggtgggcattatgtagtatccagtaatcacacacattgttttcttaatgaaatgtatgaagtcacactatgtgggatacatataaacagtaagtaagctcgggtcaggtccagttttgctgctagatgagttaaaaggaaaaacttattttcagagcttttttgatttttgcagtacaaataaagaattacggatttgtaatttatcttgctgttgagggctgttttccttctttgttcatctgttttaaattgtttggttactcttgtatctttactctccatttgaattttagagtcagtttgtcgagttacttgaaaaatccttcaacacctgtgaaaggaagggatctacagctggttagcaaaatcctgtagagatttttcattgggattgtgctaactagttggggaagaactgaatcttaacagtgtttgtcttctcgtccatgaacacagttaacttttcttttgtttagatgttcttttatgtctttcagtaaggttttagtttttttcccccaaaatgcttgtacatttttgttgatttatatcaaagtgcttttatggttttgctgctgttgtgaataggatttaaaatttcttttaaattaaaaactgcattttctagttgttactgttgatttatacatgaaaatattgaaattatattgatattgagtctgaccagtttgttgagttctgttattctaataacttatcagtttattatcttgggttttcagttagaaaatcatatattcagacattgattttaatcttttccttgtcagtctttatacttcttgtttttttttctttttcttttttgtagagacagggtcttgctatgtatcccaggttggtcttgaactcctggcctcaagcgatcttcctaccttggcctcccaaagtgctgggattataggcatgagccattgcacctggcactttttgtttgtttgttttccagttgcatggtatgttttcagcattcagttttgagacatctaaaatatctctaaaatattgtttactatgaagtacattatgctgtaatcacattctgaatgcctgagtaaatacatggtagaagggctagatcttctttaagtgggggtagtggaacgtttctgagaagggaaatatttattattggaggatttaatgtgtgatcttttcgttacagatatgatgtaagatacttcttcaagattggacagctggggaccttcttctaattaaccttaaaccgacttacagccatagagacacctcacaaagttcccatttttcgttgttgttgattttttgctttacaccttttctgaccttgcaaccatgtatggaagtgcccgctctgttgggaaggtggaaccgagcaaccagagccctgggcgttcacccaggcttccacgttcccctcgcttgggtcatcgtcgaaccaatagtacaggagggagttcgggaagcagtgttggaggtggcagtgggaaaaccctttctatggaaaatatacagtctttaaatgctgcctatgccacctctggccctatgtatctaagtgaccatgaaaatgtgggttcagaaacacctaaaagcaccatgacacttggccgttctgggggacgtctgccttacggtgttcggatgactgctatgggcagtagccccaacatagctagcagtggggttgccagtgacaccatagcgtttggagagcatcacctccctcctgtgagtatggcatccactgtgcctcactcccttcgtcaggcgagagataacacaatcatggatctgcagacacagctgaaggaagtattaagggaaaatgatctcttgcggaaggatgtggaagtaaaggagagcaaattgagttcttcaatgaatagcatcaagaccttctggagcccagagctgaagaaagaacgagccctgagaaaagacgaagcttccaaaatcaccatttggaaggaacagtacagagttgtacaggaggagaaccaggtaagttctacgtgtgtgtttaactgtattggctgaattcatgtatgtaaatgaaatagccttttttttcccttttcctagattcttcccttcgtagtatatgtatcttcctttttcctatttattttactattttgtgtcctccatttctcagccctttccaaatttggtcctgtgccctgtttttttttctagttgcccatgtctgcttgcttccattcttgcttggttcttttctctggtttctgtttctcttcgtgtctttcctttcagcatatgtgatttttttttttttaaattcttctgaggttttaattttgccacacactgtaatatcttttaccaaatgtatttagactaggtaacttaagtgtaaggtataccattaagatttgtcatgatgtcaaaaagtcattcttaaaaacaaaacaaaatgactatcacaagataaatcagtgttgtcagctgagaacagaaattacttttaaagagttaatattggccgggtgtggtggctcacacctgtaattccagcacttgggaggccgaggtgggcagatcattgaggtcaggagtttgagaccagcctggcaacatcgtgaaacctcgactctactaaaaatacaaaaattagccaggtgtgatggtgtgtacctgtaatcccagcttctaaggaggctgaggcaggagaatcacctgaacctgggaggcggaggttgcagtgagctgagatcctgccactgcactccagtctggggtgacaccatgagactctgtctcaaaaaaaaagagttaatgttgatgatgtgtttattaagtatgaacaataactattcattttgttgccattcatgaaagtttaacttcaggatgcttttgtagctttttgttctttaattctttacatttaaggtagaggaaaggcgacctggtgtgattgtttgcttgtagaaaataagtgagatgattgggctttatcatcatggggctttgcagtttgagagctaagtgccgtcacattagctgcaggaaatactcacttatttttctgtgctcctccaggttacagttgatgtgtttggtgatagccatgtcacattcagtgaggaagccgatgactccaaagatgtgaacaaatcgtattcaggctctaccagttaaaatgttaaacatacttttttgtttttgttttttttgagacagagtcttgctctgtctcccaggctagaatgcagtgacgcagtcttggctcaccgcaacctccacctcccaggttcaagtgattctcctgtctcagactcctgagtagctgggattgcaggtgcctgctcccatgcccggctaatttttgtatttttattagagacggggtttcactgtgttggccaggctgatctcaaactcttgacctcaggtgatccacctgcctcggcctcccgaagtgctgggattataggtgtgagccaccatgcccggcccatactttttgtttaaaagacttttagaatttttctctctttactttttttccccctatggtgcaagttgtgtgtacttttagaagttttcttaaacttgcaagcttgaatttttttccttcttaaaaaagctgtcttatactcttaaaaggagaatatttaattaactacctcattgttggtattatactttatttttggattaggttactcaaaattataaagaaagcaattgatatcaatttctgctttcttcttaaatgataccaagaagtaaagaagcaatcagaaattgtctgtgtctctgatgaaggagtcgtctgccacacaaagctgtttaggtccctgatggacctaatgtgtgactatggtcccataaggttacaatatagtattaccaggtgtggtagctcgcacctgtactcccagcactttgtgaggctaagggggtgcggattggttgagtccaggagttcgagaccagcctgggcaaaatggtgaaaccctgtctctgcaaaaaatagaaaaaaattagctgggtttggtggtgggcgcctgtactacttgggaggctcaggcaggaggatcacctgagactgggaggtcgaggccacagtgagtcgagattgggccactgtactccagcctgggtgacagagtgagaccctgtctctaaaaacaaaacaaagattataatacagtgtcttcactgtatcttttctatgtttagatgtgtttagatacacaaatatttaccattgtgttgcagttgccgacagttttcagtacagtaacatgccgtacaggtttgtagcctagaagcagtaggctatatcctatgtcctgggtgtgtggtaggctggaccagatgtgtttgtatgagtccacttgatgatctttgcacaatgatgaaatcgcctttctcagaacgtatctctgtcattaagcaacatatgaccgtaaatctaatctaagatttctgtcgattgtcttaccattcttactaatatgcagtccagatactcagatctactgttttggctactcgaagctctctagttacattacattttgtatgttaaagctccagacacattttcagcaataaaaatagctcattttttctgttcataaatataaaacagaaaagcatagatatgaaagcaaaatatattccagatcctcccatctactgacaactttgctattccaccgttagcattttgacatttctctttactgaaatgcctgtattcatatacacataacagatttacctgaatggaatactgttggtattatgctgtgacctttttttagctaacaacatttctactgtatattaaaggcctctaatatgtatctaaatcattatttttaatgcctcctactattctattgttattctagttaatatcacagggctaaaattcttcaaatgtacttggtattacaatgcaaattaaaaactaaaccttgaattcatttgaatcagatatctaagtaattagaaattatgatttattctttctcagatacgttatgacttcaaactactttgcttttactttttaatcagttattaaagttgtcactactcaacatttgaatattttaatatacttaaatctctttcttagagacttagcttctttaaagaagagaaattgtcctttaaaaaatattccttaggaagttctttgagtttgagtcattaagactttaagaatgtgtaaagaaagaaaaaagctcaaatagaccccactgatggagtctaaaattaagaacagggttcttaaatgctggctcagaaacatcaacatcaacaggcatatttggttaaaacagagattgccaggccttccttcataccagctaagtacaatccctggagatggggtccaggaacttaggttttgaacaagcttctctggtggttctgatgagaaaccactcttgggatctttagaatttagtaaatctaatctaattctttttttttttttttttttgagatggcgtctcgctctgtagcccaggctggagtgcagtgatgcgatcttggctcactgcaacctctgcctcctgggtcccggttcaagcggttctccggcctcagcctcctgagtagctgggattataggtgccccccaacacacctggctaatttttgtattttagtaaagatggagtttcaccatgttggccagatggtcttaaactcctgaactcatgatctgcccgccttggcctcccaaagtgctgggattaagggcgtaagccactgcgccgggtgtcaatctaattcttaaacttgtctgttgcctgtttgtcaatttgtgatgcttctgttgtggcacttttgagctcaaccataaaagaaaggggaagaaacaagggaccatttgctcagtgtgtctcatcctttattcttccactttacatctcagggatgtgacctactcctgttcgtaatgatcattaactgtaacagggaccctcagtggggatggggcgtgtgtaggggaaaaggatgtttaaaattgtagatatgtttagttaaaaagagccctccaggtgattttgatgtctcctcaccttgtgaatcattgatgcaccagataaatgttcaaatgatatatgacagcagaacagtgaagtacagtttcttcagttgacatttttgagttgtcagtaaaatactgactttagtttttaatttgcattgcactaccaagtaaattagttgaatttgtcagttgaagtacaacaccaagaaaaaatcattcctaaatacaaaataatagtacattctcagttgttttttaaattgttgttgttttgagacagagtctcgctgtgtcacccaggctggagtgcgtgacgcaatcttggcttattgcaacctccgtctgcaggggtcaagtggttctcctgtctcagcctctggagtagctgggattacaggcgtgtgccatcatgcccggctaatttttttttgttgtttgtttgtttgtttttgagatggagtcttgctctgttgctcaggctggagtgcagtggtgtgatctcggttcactgcaagctccgcctcccgggttaacgccattctcctgtctcagccatcccgagtaactgggactacaggcgcctgccaccacgcccagctgattttttgtattttcagtagagacgtagtttcactgtgttagtcaggatggtctcaatctcctgacctcgtgatctgcccacctcggcctcccaaagtgctagaattacaggtgtgagtcatcacgcccagccaattttttgtatttttagtagagacgggtttcaccacgttgaccaggccagtctcgaactctcgacctcccgtaatcaacctgccttggcctcccaaagtgttgggattacaggcacgagccaccgcacccgggcctttttttttttttttttttttttgagatggagtctcagtgttgcccaggctggagtgcaatggcacaatctcggcttactggaacctcttcctcccgggttcaagcgattcttctgcctcagcctcccaagtggattacaggcatgtgccaccatgctcggctaattttttagtttttttttttgagacagagtcttgctctgtcaccaggctggagtgcagtggcgtgatctcagttcactgcaacctctgcctcctgggttcaagcgattcccctgcctcagcctctcaagtagctggagttacaggcacgtgccaccatgcccagctaattttttgtatattagtagagacggattttgccatgttggccaggctggtctcaaactcctgacctcaggtgatctgccctcctaagcctcccaaagtgttgggatacaggcatgcgtcaccatgccccgcctaaattctgtttttatagtttggtattgagttgtaaatatcaggaggaaaaaaatgagtttgctttctttagttttgtggttaagtatcaatataacctgggttttggaaactgtgtctgtactcttaggggttgtattgggttctttttttttttttccttggtaaaaatgagattggtaaatttggagtatgtactggtgtatactagtgcccaaatatgggattctttgtgttagattttcattctttgtcaaagataattatcatagtatttatcatagataattatcatagtatatcgtatttagatatactgtcatagtatttagataattatagtatatcgtatttgaatattatgtaatttcatatgtattgttaataaaaaatcacagtttaattgaaaagtggctgagacataattttttattataagaaatattgtgcgctgggtatggtggtatatgcctgtagtctcagctactgaggaggctgaggcaggagaatcccttgagtccaggagtttgagtccagcgtgggcaacatggtgagaccttgtctcttaaaataaataaataaatttaaaagaattaataaatattgtggaaaaattgcatatgaataaacatttcattttgaaggctctacttttcaagaatggattgacagtatatgtgtgtataagattatacgtgtgtgtgtgtgtgtgtgtgtgtgtatcaaatttagagtagatttgaagttactggatttattaccattataccttgaattagctagtcaccattataccttgttggtgatgctgaaactgtgcccctcactaagatggtttttattatgaagtgactcagaaatgtcaattttaatgaaaaaagttattggcgtacttgttcattttgaaataattgaagcaattgtttatgcctatacttcagaagctgtgtggaaaatacgtaatatcctaagtacagtctgcattcagaggcaaaatatttcaatcttctgaatccttcagttcagttccagtgaaacagtccacaggattttcatgccaaaaaacccatatgtgctgaagaatggtgaacaccgccttatccagattccaccccttgccctaattaaacaccagtgctggcagtgatgtattcttcctatacccactgtaattactacacaatcctaaaattgtataactttggtccaaaaaacgaagggtgcaattttaaagtaaagggaaacactgcaatgagatacagagacagagaatgctaattaatagattatagtcagccagaagtggggcctaattacactctgcattcattataccctccatagccctcagaggtcaagcatcttccactgtataaagaagattggtttaataggatttacagtaattagtttccccatttcagtttgagactggggatttaggtccgttctaaatatttggtctgattggaccatagagatcttgttctaggatcctatcaaatgtaaagacacatttgcttataactgcttgatatgtgtggttctttattatggagttcttttagaagatgtttctaatataaatactcagcaatttttctgtctcatccttcttttgttactgaactttcagatactgctagttggagagttagaatagtatgtatttaaaagggaaggctttttctttttcttttttaaaattgggagtaaggaaggtttttagcgtatgtttgacgaagaatgaaaatctaactgtgagcttggtggaactgcagagctactaagactttggatggggcgcgcggcggctcacgcctataatcccagcactttgggaggccaaggcgggcggatcacgaggtcaggagatcgagaccatcctggctaacacggtgaaaccccgtttctactaagaatacaaaaaaattagctgggcatggtggtgggcacctgtagtcccagctacttgggaggctgaggcaagagaatggcatgaacccgggaggcagaacttgcagtgagccgagatcgcgccacggcactccagcctgggcgacagggcgtgactccgtccccctctcaaaaaaaaaaaaaaaaagactggatgatttatatttttttattctaaacaatatttaaccaaattatcatacttattttttgattatgccttgaagtaattctgtatgttgaatttagttggaagcttattttaaaaataattacttaacgtactgtcattgaaattttgtgtgaacaaaatactgtttaatattatagggtggcaggtgaatttaatgttttttgccttgtgtgtttcttttctttttggagtctgatttttgtgattctcatttacttaggaatcaagagaatttctagttcagaaatgcagaaagataacctcatgtaattctgtgtcgttttttttctcgttatttggagacttttgactattaacatttatgtaattttaggtcataccttgattttccatatagtaaaagccattattatttgccattaaataaatttttttttttgagatggagttttccgcttgttgctcagcctggagtgcagtggtgcgatcttggctcagtgcagcctccacctcccaggttcaagggattctcctgcctcagcctcctgagtagcaggaactgcaggtgcacaccaccacccccggctaattttttgtatttttagtagagatgatgtttcgccatgttgggcaggctggtctcgaactcctggtctcaggtgatccgccgacctcagcctcccaaagtgttgggattacaggtgtgagccactgctcccggccttaaataaactttttcatgaggttgctagttgtttcactgtcatttaaaatctgatcttaaaatttaggatctatgtctcagattattgtttaaattttctttttgataattctgttttaacaaggagatatagataaattgacatccttgtttatttcccagatcagtttaatcttttttgtggtttcagaaggggaatatgttaaaggcactatgcagagtgccatgagaaaatgaaatcaaatgtaaaatggataatgttccttttggggagttaataatcattttgagaagcaaaatttgtacatctatggcttacagaaatttgaactatgcatttatcaggtcttgatcatatgtgaaggtatttaagttggtataggaaatttgcttcttttacagttgatgagtttgcttatctggaatgtaatgaagtattatgaaaaataattcagcagatctaataaaaatgttgcacaaatatgagatagggcttatatgaagaaataagggcatagtatgccagataattgcagtctctctctcactttttattttcctctgtgtttttggatttcacagtgcagtgtagtgtgttatctcatctcagtgaaatgaaattatttttagagatttgctaatttacagcaaatttgcagatagcatcttaaatataggggtcctactttttattgtgcaaaagaaatcagaaaatgggtttagtttttagttacattaacgttaatcagtggaggtcatagtttcatttttttaacatttacaatcgtaccaccctctggaacttggcgtctgttttgagtgctctgttacgcccagaagagcataggaggtgcctagagaccatgctttgtaagaagtggctgaaggagctcaagcagagagaagacttgcagcattttaattatactcttaagtatttgatggacagccatgttgaaggtgatttttccttctttctttctttgttagtattgtttttggagagcaaacactggaaacagcacaaatattagggttttaaattttggctgcaaggaggaatggatttttgaaaaaagctatatccagccgggcgcagtggcccacgcctgtaatcctagcactttgggaggctgaggcgggcggatcatgaggtcaggagatcgagaccacggtgaaaccccatctctactaaaagtacaaaaaattagctgggcatggtggcggccacctgtggtcccagctacttgagaggctgaggcaggagaatggcgtgaacccgggaggtggagcttgcagtgagccgagattgtgcctctgcactccagcctaggcgacaaggcgagacactctcaaaaaaaaaaaaaaaaaaaaagaaaaaagctatatccatttgatggaagaacagtgtcacaaagtaatgcttcatcatcactagaagtggtcactgggaggtcagactaccttctgacagctgtgtgggtgctccaagtcattgaactcttcagaatgcccaaagtggtatggaataaagtgttactttggggagaaacatttagggagtttaccccatcctcccagtcccttttgtcctttttctccctccctgtctcctgtccttcctttatgacaattttgttgagatataattgagttctccctttgaagtatacagttttttctttcttttttttttttttttttgagatggagtctctgtctgtcgcccaggctggagtgcagtggtgcgatcttggctcactgcaacctccgcctaccgggttcaagcagttctctgcctcagcctcccaagcagctgggactacaggcacaagccaccacgccctgctaatgtttgtatttttagtagacacaaggtttcaccatcttggccagactggtcttgaattcctgacctggtgatctacctgcttcggctttcaaaagtgctgggattacgggcatgagccaccgtgcccagccttttctttcttaatctgatttactcaatgaagattttgaagaaagtaatagtaagttgccctagggagttctagaacgagggcataagtgatgtaataaaaaatactgtttaggagcagcttttactgctgtcagcagagtggattgaagaaagggtggggaaaggaaatgagtttcttgtagaagacctggattaaacagggtaatagcaatgaagaaggtgcacatccgtgagattttcaaagaaatatttggatatatgcagggcacgatggctcgtgcctgtaatcccagcactttgggaggccaaggtgggcaggttacttgagcccaggagttcaagaccagcctgggcaaaatatggagaccccatctcttaaaaaaaaaaaaattagctggcatggtggtatgcgcctgtagccccagctacttgggaggctagggcaggaggatcgcttgaccacgggaggtggaagctgcaatgagctgtgattgtactactgtacgtccacctaagtgacagagcaagaggctgtcaaaaaaaaaaaaatttggatatagatagcgagagagaagaatacagtgaaccgtggtattgagattggggagctcgcttcccgatgattaacatgggaaaagtggattagaaggtggaactaaatttagagtcaggaatgatgaacgtggttttaattatgtgaataaaagtttttcgtaagaatttggagataggagactaatgactgtgacctcaggtacgtgcatatagatgttatgaaggtgtgcttgttaatgttggggaactcacttgtctggttaactcaatatcagctacacgtctctgcttatgggagtaagaagtggagagggagaagccgttagaaaatacagttttatgtattttttctcatccagcttgattggtgttttggttctctgtctttattgtggtatttttgtttgacagcagatacctcgagtgattctctcaattcctgaaagttattatttattaaaaaaagttaatattgatttatgattttttcataaacttttagatgtcccttattttgttttagttaacaacaagtttattggagatcatgtacccacctctgtttgataaattaggagtgactttgggaaaaagagaaatattacaaaaaatgtgctttcagtgaggaaatgataaattttgtttttgaaaatgttctgttcttcccttatggacaagattagaaatgcttttatgaactgtttttggctgccatacacgtttctaaaaatactcatttttctttttctttctttctttcttttttttttttgagacagagtctcactctgttgaacaggctagagtacggtggcgtgatgctctgcctcctgggttcacgccgttctcctgcctcagcctcctgagtagctgggactacaggcacccgccatcatgcccagctattttttgtatttgtacaacacaaagacggggtttcaccgtgttagccaggatgatctcaatctcctgacctcgtgatccgcccacctcggcctcccgaagtgctgggattacaggcgtgagccaccgcgcccggcctaaaaatactcatatttctttccagatttggaaagttagtctttaacatagatcttttcctttgatttttccatatattgacaatacttattgaaccctcccgccctttattttgccagtcttttctacctaataggctttcctacctaatactggattgcagtgacacttgcttaatttcatatgtggtgactatataggccgagaaagtgagataattcagccttaatgtacacactgtaccatctcttaccagtggctggtggcttgtgtactttcagagaatgtgatatgcaaggatctgtttagctttgaagtcaacctgagataactgctgtgatcttaaatgaccctcaggtacttgaatagtcctctgtagcagtaattcttaaactttttggccacaggacctctgtaaattgtaaaaattattaaggaccccaagcaggttttgttgacgtaggttatatctaccaatatttgtcatattagatactaaaataaaaaattaatatttattaatacatttagaaacaataaacctaataaacgttataagtaacgttttaaaatgaaaaacagttttgcaagtctctctctctctttttttgttttttagacagagcctttgcactgtttcctaggttggagtgcagtggcatgatcttggctcactgcagcctccgcctcctgggttcaagcgattctcctacctcagcctcctaagtaggtgggattacaggcatccaccaccatgcctggctactttttgtatttctagtagagacagggttttgccatgttggccagactggtctcgaactcctgacctcaggtgatccacctgcctcagcctcccaaagtgctgggattacaggtgtgagctaccgcacctggcctagttttgcaggtctctttaagactacaagtctaacggctttatgtggttcttctgactcttgtaagaggctgccactagagtcctgactaggttactctttagctaagatctctcttattggtttagtattgtaattaaatattatgacctgtgacatcaacatggattaacaaggatctctgactttttcatcaagggttaagaagttacactgtttctttagtaacagtgagtaatggaaatgcggtggggaatggtgactttgttggtttgttgttgatagcatgtatttctcgacccttagagaggttctttgggtgggctgtcttaaggaagccctcgtattgtagttggctaaccaataggcccgcaccgtcacgcccagctaattttgtattttagtagacacaggtgttgccttgttggccaggctggtctcaatctccagacctcaggtgatccacctgcctcgacctcccaaagtgctggcactacaggcgtgagctactgcatctggccaaccagtactctcctttttttttttttgagatggaatcttgccctgtcgcccaggctggagtgcagtgatgggatctccgctcactgcaagctccgcctcccgggttcacgccattctcctgcctcagcctcccgagtagctgggactacaggcacccgccaccacactccgctatttttttgtatttttagtagagacagggtttcaccatgttagccaggatggtctcgatctcctgacctcgtaatctgcctgcctcagcctcccaaagtgctgggattacaggcgtgagccaccatgcctggcctggttttttttttttcccgagatggagtctagctctgttgcccaggctagagtgcagtgacatgatctcggctcactgtaacctccgcctcccgggttcaaccagttcccttgcttcagcctccagagtagctgggattacaggcacctgccactgtgctcagcctccagagtagctgggattacaggcacctgccactatgctcagcctctagagtagctgggattacaggcacctgccactgtgctcagcctccagagtagctgggattacaggcacctgccactatgctcagctaagctttgaatttttagtggagacagggtttcaccgtgccaggtctcaaatgcctgacctcaagtgatccacccaccgtggcctcccaaagtgctgggattacaggtatgagccactgcgcctggcttagtatttttaattttttaaaaaatacagttgcagtgtatttatgtgataaacctacagcatttgttgtatttcaaagaaacatttttgggaactaagtttgttttataggacttaaaatctgaaaaattgggagaatacattccaaaaatattcttttatctttcttgaatttgataactgcataattagtaattttttcttttcacatgactcctcttcatgggcataggaacttaaagcaggtgccacattcttaggagggagtgtttccaacctttcctatcttgcaattttatgagggtctatttcttacttttctgtgaaacgtgttatctatggtacagagtattttctttttctttttcttcttctttttttttttttttttagacgagcgttgctctctcatccaggctggagtgcagtggtgcgatctcggctcactgccatctctgcctcctgggttcacgcgcttctcctacctcagcctcctgagtagctgctatgatagacgcccgctaccacgcctggctaatttttgtaatttttagtagagacagggtttcaccatattgaccaggctggtctcgaactcctgaccttgtgatctgcctgcctcggcctcccaaagtgctgggattacagacgtgagccacagtgcccagcctgtacagagtatttttaagagatgaagcaggtaaaaggatatttacttaactggtagcagataagcttttggatttctcttggtatttctgatgaaagatacttattttcaagggatagtgtgttgggtctcagttgttggaaagttgtgggaacactgactgttagaataactaggggcagcaggtgtttctaggatgtagggtggagagggcttaaagttaccacattccccacacggcttaggacaggtctgcgtactgaaaaacagtatcctcataccatatgattttcatgtgtcttgctagaaatttgataggataaaaaatctgcttatagtcatttgagccaagatcctataataaataaatgtgtgtaagtacattagcatcgtttgaggatgaagttgatagaagattaaacttcattttgtttgtaactttacctagagtttttgccattttggaaaaccacttcaacagcaacattgcattgtcgctcatgctactgtctcttcagcctctgtttgcatatgtctttcggtgtagttgtgccctagcatttacatgttaacagacattctattttattataaatgatttcttttcatttttccttcatacagcgttacataattttttttgaaaccgtatgtgggagcgggcttattatctgtgcatttcaggatagcaaagggcatatttacaaaatatttgttataaaatgggagggtattaagtctgataagcctgaaattcactggtgtaatagatggaacactgagtcaggagatctgcattctagctctgatcctggctctgccagctgtgtagccatggcaatatttaagctttttgaacgcctgtttcctcgtctttaaaacccagagagttggactaggtgctctttagagattctttcttctgaaattacttgattttgtttttgtcagttatcctagtggaattctctaagagtctgttcactttgatcataatgcccaaattcaaaactgattcatataaacaagttgtgtgcttctgggaatgagacatgtatgactaatgaagtgcttttcaaggtaagtggcataaaatcagtgtttacctgtaaagagcaaagagccttcatgtgaatttcatcagttgacaaatggggataataatacttgtattattgcaatatttaagtgagattaaagaagataatatttataaattatggacaagactacctgacataataggtatgcagtataataaatggtagttgaattaaaattaagtcaaacatttcttaaatacaaatacattttataatatattttgaagtatgaaatacaccttacatgatctgctaccagaggcaaacagcagctgggacctataaaatgtctttagaaagtgggtcacagtggataataggtttcatttggataactcatcactaccagcccagccttaatattcctgtaggagttctcaggaactttgagtagggtaattagctctcaggattttcagttaccgtcatattcattatttaacatttttatttccacaacgactcaaccatgaattatggagtgctttcccagaaggaatgtagtgttgctggaaatacagtttttattgctctattttctttctaaggtatggggttcctggttggttagttgcgcccaaaactctccgcaaataatttaaaatacgtgcttttttatgaagatgacttaacaaggcagtggagatttctcttgaatgggcaacgtagaatgcttgtattttcttattctgcttattttaaattactaatttttgtactgcggtcctgtacattaaattcttacataagtgtatgtcactaaaaggtatactttgcccacaatacctattatttactccactgacattaaaattgtagcattgcatctgaggttccctttggtttttacgtatcatttgctgttgtatcctttaaaaaatactgtaatagattcgtcagtggagctgatgtcttactgtgatgctgttatcaaatgcatctctgagtacctatggtagagaactagtgaaggtgttaatatctattgtagatatagatgctaatatatctagactattgtagatgctagtaataattattgtagaatatttatagataccatcctagatgctttcatatacattgcttctaatccttactaacagttctgtaggtaagcaatgttgtcctcatttataggtgaggaaattgaaaattcagagaggaatttgttcaggttcacatctgtctagtgacagatactggtccgtctggctacaaagccaaatgtcattgtgtttttgactaaggacaaatgaatgaattgtacatacttgtttaaaatatttattgaaaaattaatatttattcagtcatttattaaatgtaaaagatggcattaaaattcctctgtgtttttgttggaggaggaaatacgagaataggtgtatcataggatccaaaggctcctgagaaggggttaacattgagagaaggggtagaggaaagagataataggtgatcagttgagaagatgataaatataatttgattagtttaaataatcagtcaatatcagcaggtgtaaatgacatacatcagtacttttcttgttctgattaggcggaaaggattagattaatgattcccaggcttgcatttcacacactagcaaaataaaaaataaataacaacaaaaaaaagtgggggagactggcataggattgtcaaataaaaacaattaaaaaacgataatacatattactgttattttataaggggaaagtcaatttaacaccaaaggaattgtgcataatttcacaataagagttctttcaagaaaatacagattttaactttgtagtgacaattttattaagtcaacttgacatggactggctttgagaagcattagtttttgatagggatcaccatattatagccaaatccttcctacaggagctgtacatcctacaagcaaagaatggcttttccatttttaaatgattaaaaaataaatgtgatatgtgaaaattatatgaaattcaaaattcagtgtgcataaataaagttttattgggacacagctgtgtttatttttgtattatgtatggctgctttcacaccagtggtagatagagtagttgtgatagagtctgtgtgacttgctagacttagtacagtgtttacttaactctgaccttttacagagtttttcagtactttgtttagataacagagtaaataataatagctaacacttgtgtagtgtttactaagaaacaggccctgttttatgtgctctgtgttattagccgtcataacaactttatgaggtaggtactgttaattttattgaagtagagactaaggctgagagtaggttgcccaaagtcacgtggctgttaggtggcagaggcagccttccgaccggatagtgccactccacggtatgtgctttgtcggggaatcagagacttgaggatgtgacacacccttcacatttgccttagttgttttagggaaagaggaaagtagcctgattctagagttgccccaagtgttatcattgagtagttgaatgaagaattcagcattaattacttcatgatgtgtgaacatttggtgtatttttatgtgacccagtggattttccccagaggtctgttgattgaaatgtcctacttattgatgtcctagttattgaacttttgaacaaataaatctgtcatttctgaactactgagttcatttggtgtaattagaataataacactgttaacttggtggagggtaactgtttctctatcataaatatttattgtgttgttcttaaggagcgtgaggcataaccccccgttattgatttaatttaaaaataaaacatttattgacatacacagaagcattttaattaaaaatttgttaaatggcctttttttttttttttttgggtagaatatatatgtctttgtatgccaaagcctgaaagaagaattaaattaccagtaattgggtttttagctgaatctattcaaggggaaatcactattttctttttagagatggctttgggtggagtaggtaaggtttcaagaactggttaaattacagaacattgacaagtaagtgaataaactagaattagtgtgaacacttctgatttcacaagtaaggtgtttgtgaacagtgtttctacattgtaatggcactataaaatgctgatttaaataaatagaagtttagtgactatactttttcttagttaaacctcactgtattctgagatttaaaaacgacagttaactaatactcgttttgtgcttctctgaaggttagaaacatgtgtctaaaacgggttttaatgggtgtaagaccacagagaagatagaactgacactttagtaagattctttttttcaatctatttaattattctatgattttacctttttgaaggtgatggtgggtgaattagggtgggtaaagggtagggggaattgagacagtggtaaagcttgattcttgacttttagtttgcttttatctttaaattttggaagtcaccttttgttcattttgaagttttgggcaatgttcttaggctagatgcagataatgcagataacaacggccagcgcttcccatactagagggcgttgaatttctcaaagtgttgacttgtttctgatttttttgcctttgtttggtttctatttgctgctatgttgttgctcttccccgtatgagatatggttatggtattggtagaattgcagtgttggtggtttttcttcgtcttcccattccatccataaccttgacgctaataattttgaaaactatcgttcattacaagggttaaaatctaaaatatgaccgtgcaggttgaggtggcatgttacagctcccgccacctcttttccttgcgacagatggcttcccctcctggttgtaatccgctgctggtttttttcgaagaatgaataccatgtgttccccattttggctctggctgtgttctacccactcactggcttcagaggaacttgagataggatgtacttgctgctggcatttatggcaggaagtggatacaactgtgatactttgtgccaagtgttcatttattagaaaaattgtgcttcctaaaattaaacattatttctctgtcacatcaagagtaaagctaaattttgttactttttagaatatgctttacacttaatgttgttgttataaaaattttttggtggcaaatgtattgcaaaatagatttttaaatccaaatttcacatattcaaagatttatagtctgtgcaagacattgaatgagtagctctaattgcactagtacaataaatataattatgaaagggatctgtatcacagcagcagttggaattgtttgtgatgtgtggtattgaacttgtggttgcatatgctttgtggtacctatagacagtagtatttgtctattttaactctcttgcttcggatctccccttgagtagattcagctaaataattgataaatttcaccatcttaggccttgttgaaaattataagtatctgagacagcttaatttcataagtctactgtgcatatttggagggatagtgtttggttttaaaaaaaacctggcaggccagagtaaaatattttttatgtttttgtcaagaaataccccaagataaatgtaaacaaatatttgcgtattaccctcattgatactggaattggacatttctgtcttcagaagtccctgttctgtcagagtctcccgtacttgcctgagtgaatctagtgctggattggcgaaaatgttgccgctcatggcagatcatctctaaatctgtcttggcaacatctctagctgaacccagatcggtggttctcagcctcggctgtgtattggtatcaccgagaagcttaaaaaacaaaccaaaacctgatgcctgagtctcacccaaaccctcagataatttgatttaattgggcttgggttggtcttgctgtggggatttgaaaaatctccctgagtcattctaatgtgaagtcaaggttgagaaccactggctactgctaatggataagagttggtagtatgaattgaaatgtatttgccatcctcagtctagtgaggggattttctaaccatgccacaatatataaacaatttgcaatttgaatggatggaggttggttatcattggaatttgaaaggacaaatgacaggtaagatgggatgatttaccagtgttttgtgacttttttttttttttttatctttttgagatggagtctcactcttgttgtccaggctggagtgcgatggtatgatctcagctcactgcaacctctgcctcccgggttcaagcgattctccagtctcagcctcctgagtagttgggatttacaggcgcctgccaccatgcccgactaattttgtatttttagtagagacagggttttaccatgttggccaggctggtctcgaactcctgacctcaggtgagccacccgccttggcctcccagagtgctgggattacaggtgtgagccaccgcgcccagccaatgacattttaaaagaattgccttcagagggtagccggaaaagcagatggatgtggtacaagaggtcgtcccacaacctcctggggtggggatgcccactctgtggcaacgttaaggagaatgagaagggtgagaagagagcaaatgataagccctggattttgggacttggccaaaaaagaaaggatggaacaggacgtcaggataagatctaagacttgaagcagaaactgtacttcttcctgacccaagaagtgtgagacaggcacgtggtggtagcaaacaggatggaatgagaggttcccttttacacccaaactttttctttgcttagtagcagaagtctcaaatttttctttattagagcattttcttgattacagcattccgagctttactgtatgtgaatcacctgtgagcactgttaaaaattaaaatttgccgggcgcggtggctcaaacctgtaatcccagcactttgggaggccgagacgggcagatcacgaggtcaggagatcgagaccatcctggctaacacggtgaaaccccgtctctactaaaaaatacaaaaaactagccgggtgaggtggcaggcgcctgtagtcccagctactcgggaggctgaggcaggagaatggtgtaaacctaggaggcagagcttgcagtgagctgagatctggccactgcactccagcctgggtgacagagcgagactctgtctcaaaaaaaaaaaaaattaaaatttccagacccccctcccaaagtttctggttcaggactgctcggggagggctcaggaatctgtatttgtgaaggttaactgaaccttttttgtttgcttaccatctcttcagtgttttccctattctatttatttagtaatttaaaaagttgactcattttaaaaaactgaatcttactttaaaatgaaactctcactgctacatgtggaaaacatttgccaaaaaacaaaaaatgaaagtataaatacataactattaagaaaaaggtcaggccgagcactttgggaggccgaggcgggtggatcacgaggtcaagggatcgagaccatcctggtcaacatggtgaaaccccatctctacaaaaaatgtaaaaattagctaggcatggtggcgtgttcctgtagtcccagctactagagaggctgaggtaggagaatcacttgaacccgggaggcggaggttgcagggagccgagatcgcgccgctgcactccagcctggcaacagagtgagactcagtctcaaaaaaaaaaaaaaaataaaaaataaaagtcatatatgtaccactgaagattatttttaatatcattttgggaaatatacttctagtgattctgatacagatagttttgtcatcatacttggagaaatactgaactagagacaaaaagtttcacttagattgcatgatttccagctattgttgcacacttggaattgcctggggcgcttttacaatacttttggtcagcctccatcccccaatttaattggtatggtctgcaacctggacatcaggatttttaaaacactctcctaaggtaattgtaatgtatattctgggttgaggatttagaggttaaaaagcatataatgcagttagactaagaagcataaattcatgaatactaaaatacatttacctgggtataattagaaataaggaaaactgactgggcatggttgcccgtgcttgtaatcccagtggtttgggaggtcgaggtggtgggaggatcgcttgaggccaggagcttgagaccagcaagggctacatagcaagacctcgtctctagcaaaccaaaccaaaccaaacaaaaacaaaagaaaagaagaaaaattagccaggtgcagtggtacgtgcctgtaaatcccaactactcaggaggctaaggtgggaggattcctggaggccaggaggttgaggctgcagtgagtcctgatcctgtcactgcactccagccttggtgacagagcgagaccctgtctcttaagaatgaaaaaccccaccgtgaccacctgggggatgtggcagggggaggggaacagaaggtgaattcatgaagcactaaggcatctggcgttgtgatctcctctggctctgctgcttctcttgttttctgttcttgatgaatagcaagatcttttagtcagctagtccccaaacttaagtgtgcatcagaattaacttgagggtttgttaaaacacaattgctgggactcatcctcagaacttctgatcaagtcagtctggggtggggcacaagatttcgtatttctaacaatttcccaggtgatgcttatgctgctggtcagggaaccaccctggaagcactcatctagttaaccaagctgaaaacttagaacattagcctgacatttattgtctctatgtattttatatatatccagcgaactttaaagataattacataaacacaaacctgtgtatccatcacctagaattagtaaatgttaatgggtgtgtggataaatattaattatgaataaatattccctttttggtgataataagctgtgtattttttttcacacttttgagtacaaggaataaaaatatacgacttttctgggcttgagataagtgccttttttttttttttgagacggagtctcgctctgtggccactgcactggagtgcagtggcgtgatcttggctcactgcaagctcacctcctgggttcatgccattctcctgcctcagcctcccgagtagctgggactatgggtgcccgccaccacgcccgggtaattttttgtatttttagtagagacggggtttcacagtgttagccaggatggtctcgatctcctgaccttgtgatcggcccgtctcggcctccctaagtgctggaattacaggcgtaagccactgtgcccggctgagatgagtgctctttaggttaagctataacgctgaagagaaaatagtgctccattaacttgtttgattagtctttttggcaaccaaatgagataagcatagaaaaacaataccatctagattgtatactctgagaaaaaacgttaaaaagtattatgtatctgaaaatgaaattgtcagccgggcgcggtgactcatgcctataaccacagcactttgggaggctgaggagggtggatcacctgaggtcgggagttcaagatcagcctggccaacatggagaaaccccatctctactaaaaatacaaaaattagccgggtgtggtggcgggagcctgcaatcccagctactcaggaggctgaggcaggagaatggcttgaacccaagaggtggaggtcgtggtgagcagagattgtgccattgcactccagtctgggcaacaagagtgaaactctgtctcaaaaaaaaaaaaattgtcagctgcaatcattttatcctgtttttctctttgaatagtttatttgaatagttcacaggattaataagttgaatttatttctatatctagaaacttgggaggggaagggtaaactgctatgtatggtataaaaatgtataagtgttgtgaaaatattattttcaattctaaagcacttgttcaattctaaaatgacttgtttcccctatgcttgatataggtcaagagggaaaaagcattaatgggtattatttattcagcaaacattgagtttatattcgggactgtcactttgattatggaacagttcaagtagttttcatcagtgttgcccagctttttgttatgcattaaatatgtacttcattcaggaagagatcaccccagccaggttagttttgtcagatagaaataatgctgtttttgtattctcctgaagaatgtatgtgttttttcatcttggagctaatactaggattccctgaacttgctagcttctataagtcctcctcagcattctttgaaacaagggctttggaaagtgtggacttactgtctcatgaaaatccttgtatagcttcagttgtcctccctcctatctatttatttttcatgaaattattctcttgacacacttgttgttttctatttagtcttccagactcttctatttgcttccttcttggactgtttgttctctcttgctagaacgctttatcttcactcatttactaaactttaagaaaagagtccttcccgtgtttcctttaacagggaggccagcttgttttacggctcgtatgatatatgcaggtagtagaagacaggtgaaagcaaatacttggcaaattatggtatgtttacttcagttttcataccgtctgggagcttggtctcttttccctggaaaccacctctgttttgtcttgcagacgagagtgtgatctttaagctagcttggccttttgggtggtctgtgcttatctttcaagtgtttgcagtaatcaggaccagtatataaaaaaaaagcatgctgcttatgttatttttattgtcctgatcttctagattcagaaaaaaaagaggttattgtttttataactggatttcctatatttatggataagaattccaaaactaacaaagagaaaattatcttgactcttatgtgctgtaaaaatcgtgtattcaaagtttgcactgtcacaattctggattcatgaggatttgccagacatttaaattaaagcctaatcaataactttcttttttgtagagggctattctaagaccagtgctttcccagggcctgggtatattatgtagtatgatgaatatcacagagcaattgcccttgtttaggaactacatattgggattcctttaggatttttgttttaacttatgtttcactaggattcttccccaccacacccccagctgtgtttaaaaaatttacctagtttgtcccttgcctgtttggctactagatatatttaactgaccttacagagtgctgcagtcaaagttcagcatttaggcaaaatggatggcagcattagctgtttttctcctggcgtgtcactgtgcattatctgggatggcatgctttgtgagtatctgtgtggtttcccaatgagaggagggaggtctggctgcattcactctcacaaggtgacctttgtttctacgcagtctctgctttaacaaagcattgtctaatcagtctatcaatacatatttattgagtgcctaccatgaatgcccagtagtatgctgtgtactttgagagatttttttcacaaggggacagggtagaaagagagaaacatgcatttgagtttaaaataatgttaacatgaaatatatagaccgtgtgtggttttataaacacgaatttctggaggagcagaattctagagtgaggttaagatcattatttttcaattttttcaggcatttcagggatttttttttttgggggggggatttgttcctagagaattattgagtttcttttgaggtgttgtatttcccttgcttttttgtgtttcttgtgtttatactttggcatctgtgcatctggtgcagcagctgctccttccaattttatggagcagcatttgtgcagaaatactttttcctgtaggtgtatctacagtattggttgggtaacgtgctttggccgtacaatagaatattattcagccgtgaagaggaatgaagttctgatacatgctgcagtgtggatatacctccaaaactttatcctgactgaaaggagccagatacaaaaggtcacttattgtatggttccatgtatatgtaatatattttgtagataaatctacagatgtagaatgctaattggtggttgccaggggctggaaagcgtgaggaatgggaagagactgcttaagggttaggagttttactttggggtgatggaaatattatggaactaggtagaggcagtcattgcagaacactgggaatatactaaatgttactgaattgttcactttaaaatggttaattttatgttatgtgaactacacctcaataccttattttttaaaagttttatgaacagtcataaattaaaacagatattcactatggtgattaatataattgccctttgttgagtatttactgtgagctggaaccttctcatatatcgattctaagccttatgtcagcattgcaagatagattaggaagaacaaacaaagaactatattagtagtttaaaatagtggctttaaactgcttaataccttgtttatcaaatcaagtgagcccttgaaatttaatcagggactggacaatagggagtacctgtgttacttatgttgctctggctatgttgacagcatcttaaatgataaacacagatttgttgaatgagtttgatactttgaaaattagcagttagaggctaggtgcggtggctcacgcctgtaatcccagcactttgggagactgaggcaggtggatcacctgaggtcaggtgttcgagaccagcctggccaacctggtgagacctcgtctctactaaaagtagaaaaatcatccagatgtggtggcagacgcctgtaatcccaactactcaggaggccgaggcagaaggcgagaggtggaggttgcagtgagctgagattgcaccattgtactccagcctgggcaacagagcgagactctgtctcaaaaaaaaaaaaaaaaaaaaagcaagaagtatctgattatgaatttatatttatttgagttctgtattttgtctttcagttttaagttttgtagttgaaaatatggaaccataggtgtgtgccaccacactcagctagtttttgtattttttgtagagatggggttttgccatgttgcccggactggtctcgaactgttgggctcaggcaatctgcctgcctccacctcccaaggtgctggaattacaggtgtgagcttctgtgcccggccaaaacataagttttatgatataacacttgctctgtgggcgatgttagatgttttaagttttgttttcttttaatggaaaacggttggcaaccactaaattgtttttacaactcattttataacaagcccgtttgagaagtttttagtgtaaaatgccagtgtttctgctatctgatgaagagcatcaggttgtataaaattttactgttggaaagttagcatttggggaagactattctaaatatatgtaactttgtagttctgacacaaacagaagtaatgttaataaatggtacctcaggagattacttggatggccctaggatgccaggtcatagtagccagagaatgcttcaacatatattgaaaacgcacagaaataattgagtagaaatgcttgcttacagtgctgagaaaatgctgatggaagtggatctctgagtgcaggagaaagtgcagcctgtcttgagcagagggccatgagcgctcaggggtgtgccctgtaggaagggagccctggatgcaggtgctcttttttagttttctcaaaatagagctgaaaggattgctatttattcagcaggcaagctgagggcattttcctttcctgctgaaggctgtaattctgcctctctctgtagttcttttgcccaggaaaaggtatagatgaatcagcacagctttgttgtaatgatagtcctctctttactgtgatcatgtatgagctaatttatattgtaaaaaatatatttaaagcaaaactgtgggtccagtgtagtttgccaattttactgtatttcattttagccactgcttttttttttttttttttgagacagagtctcaccctgttgcccaggctggagtgcagtggcgcaatctcagctcatggcaacattggcctcccaggttcaagtgattctcctacctcagccttccgagtagcagggactataggcgcccaccaccaagtccagctaatttttgtatttttagtagagacgggttttcaccatcttggccagactggtcccgaaatcctgaccttgtgatccgcccgccttggccttccagagtgctgggattacatgtgtgagccactgcggctggcctagccactgctttttagagtaattgccatagctggttgtgtcagtttgacattttgatttcaaagattgtattatagtcgtttgccaaatgtcattgagttcagggttcttgaatgataggcataaactcactggtgctttgtttgttaagagtattatataaggccgggcgcggtggctcaagcctgtaatcccagcactttgggaggccgagacgggcggatcacgaggtcaggagatcgagatcatcctggctaaaaaacggtgaaaccccgtctctactaaaaaaaaaaaaaaaatacaaaaaaaaactagctgggcaaggtggcgggtgcctgtagtcccagctactcaggaggctgaggcaggagaatggcgtaaacccgggaggcggagcttgcagtgagctgagatctggccactgcactccagcctnnnnnnnnnnnnnnnnnnnnnnnnnnnnnnnnnnnnnnnnnnnnnnnnnnnnnnnnnnnnnnnnnnnnnnnnnnnnnnnnnnnnnnnnnnnnnnnnnnnnnnnnnnnnnnnnnnnnnnnnnnnnnnnnnnnnnnnnnnnnnnnnnnnnnnnnnnnnnnnnnnnnnnnnnnnnnnnnnnnnnnnnnnnnnnnnnnnnnnnnnnnnnnnnnnnnnnnnnnnnnnnnnnnnnnnnnnnnnnnnnnnnnnnnnnnnnnnnnnnnnnnnnnnnnnnnnnnnnnnnnnnnnnnnnnnnnnnnnnnnnnnnnnnnnnnnnnnnnnnnnnnnnnnnnnnnnnnnnnnnnnnnnnnnnnnnnnnnnnnnnnnnnnnnnnnnnnnnnnnnnnnnnnnnnnnnnnnnnnnnnnnnnnnnnnnnnnnnnnnnnnnnnnnnnnnnnnnnnnnnnnnnnnnnnnnnnnnnnnnnnnnnnnnnnnnnnnnnnnnnnnnnnnnnnnnnnnnnnnnnnnnnnnnnnnnnnnnnnnnnnnnnnnnnnnnnnnnnnnnnnnnnnnnnnnnnnnnnnnnnnnnnnnnnnnnnnnnnnnnnnnnnnnnnnnnnnnnnnnnnnnnnnnnnnnnnnnnnnnnnnnnnnnnnnnnnnnnnnnnnnnnnnnnnnnnnnnnnnnnnnnnnnnnnnnnnnnnnnnnnnnnnnnnnnnnnnnnnnnnnnnnnnnnnnnnnnnnnnnnnnnnnnnnnnnnnnnnnnnnnnnnnnnnnnnnnnnnnnnnnnnnnnnnnnnnnnnnnnnnnnnnnnnnnnnnnnnnnnnnnnnnnnnnnnnnnnnnnnnnnnnnnnnnnnnnnnnnnnnnnnnnnnnnnnnnnnnnnnnnnnnnnnnnnnnnnnnnnnnnnnnnnnnnnnnnnnnnnnnnnnnnnnnnnnnnnntattctcctacctcagcctcctgagtagctgggactacaggcaggcaccaccacgctcggctaatttttgtatttttagtagagacggggtttctccatgttggtcaggctggtctcgaactcctgacctcgtgatccgcctgcctcggcctcccaaagtgctgggattacagacgtgagccacggcgcctggcttatactttcttattttgtctgtaaactctgtgtatagtgcttaaatgagagtttccctggactctaaagagtatattcatattgcctaatgaagcttttatgtgttgatttcaggttatttgctgcctaactttaatacttaagtgaacttataactggattagaaccttgatgatacggggtgggtaagggattttcaaaaagcaggtggattttacttacaggccaaggtctcaaggacagctattgctttctagctttaaaatgtccctcattagtgtacatttgaaggtttggcaaatttcttagttttagtgttcattgtttcttgactggagactaactttggaactgattttggagtatgtggaagagtgcattgttatagtagcactgattcttgatctgtgcattttttgtttttgagacagggtattgctctgtagtccaggctggagtggtgtgatcatggatcattgtagccttgaccatcccagctcaagtgatcccccaatctcagcctcctgagtagctgagaccacaagcgcgtgccaccatgccaggctaatttttaatttttttttttgtagagacagggccctgccatgttgcccaggctggtcttgacctcctgggctcaagcagttcttcctcctaagcctcccaaagtactgagttgtaggtgtgagctactgtgtctggcctgatctctgtattctttaagaagaatattctattcaccctcttactttataagcacaattgtaccatcttcaggaagcactcgttatcttttagcaatgttacttctctccaaacgcagagtaggtaacagtaatttgtagagctatttctttaatagtttttcctcattacagagtaatacttaacatgataaaaaagtgtgtaagaatactaaagggtatgtaggaaaaaaaccttctatacttctatgcgtcgtagacatacccaattgggtttatgcatgcatgtgtacacataccacacacgtttctttcgttcttgtagagagacagggtctcactgtgttgcccagcctggagtgcagtagtacaatcatagctaatagagcctcaagctcctgggctcaagtgatcctcctgcctcagctgcctgagtagctgggattacaggtgtgaaccaacagccctggctaatttaaaaaattttttttgtagagaaagggtgtcactctgttgcctgggctggtctcgaattcctagccttaagccatcctccctcctcagcctcctagagtgctgggattataggtgttagccactacacctggtccacacattctttatatgactttaaaaaactgattaaaaaacttagagcatctgccccacgttactaaatactcttcaggaaggttattttaaatgactatatgaaatgatgtcatgtttttagccattcttttattgttgcatatttaggatattcctttttttttattataacactgtcatggctatgtttgttaatgcattttcacattttctgattgttttccgaaggtagattgctaaataatcgaatctatgtgtcaaagacgatgaaaggaattacagcagagtccatttccccgtatacattatacgctcttaaagtgtttaacgtggcattcgttactttgtaatgaaaaaaagttacaaagattagtccgcagattattatattatctaccttgtgtttggagagaaaagcagcatggctaaaatatagtctctacttcttgatgatgacacaattgtgcttataaaatgaaagaggtgtattataatattcttaaagaatgcatctttttaaaatagctcttgatcagcccttcgcaattcggtccttgaggaaattaagctctaatgccctgaggtatctaccctgtgtagtaaaattaacgtatttcctgtgcatctcgagctatactggcttgaattatccttgagagaattgagaaaacagtcctgaaattattttatgtagggcttaattctttagcagaatacagtactggttaagaaaggctgttctggatatacctactgacaaactattttccgtaaagattagactatctcactagcagtctgtaagaatgccggtctcactttacatcttaatgttatctttaccctgaaaaaaaacttgcctgtgttgtacgttaaaaagtattattttgttttaatttgcattttttttgtttacatttttcatgtgtttacttgctatttgggtattatctgtgaattgtgtattttttgttaatttttcttgggggaagggaagagcttaatatttaatttatatggggtctatatagtgaggataaagttttttctctcacatttgttataaataattttcagtgtttgtcgtttgctctttagtttttatgtttttgatgtatacacattttatattggtaagcagtaaaatgtaccacactttttttttttttttttttttttgcaattccttacgtttctttttttcttggaaaggccttctttatctgaatgaatatcattaaatgtgtatatatgttttttgttttctaattaatttgcattttactcttagttctttaattttccttaagaatttattttgtatttttgtgtgaggagacaaacttattttgatgttttcctaataactgaagattgttctacacattgtgtggtaaagatcgttccctttccttttggtttgtggcattttttgttgttgttaagtgcttatatattataagatctacttttctgtttgttatccttttttctggtactttcttctagtactagattgatttaattattacaggctaataattttgtattaatggccggttgggcattgaaaaaatttccctcccatatctgtatttttgccattctcactcttgttctgaggtgctgccagatactcttacccaactctttatatatcccacctgcctcagggctcggctcagatgctgtttcttcacagggccctcccgaacccaaccctatctaaagtaggaaatcctgtacccagtctgccatattatcctgtctcttcaatatcatttatcacaatttgtaaataacattcttgacagtttgtctactttctttttcattggaatttcggtgccatgagggtaaagatcttatttctcttgcttactgctgtatcccttgtacctgacacatagtaaatactcaataaatatatttggatctggaagttcattaaaaatgaacttcagaactgttctttttctcagtcaaccacaatcagggttgtgttaaacctgcaaattatttttcaagtatggcgtacggtggctcatgtctctaatcccagcactttgggaagctgaggtgggtggattgcttgagccgaggacttcatgacctgcctgggcaacatggtgagacctcatctgtaaaaataaaaataaaaataaaaaggtagccaagttttgtggcatacactggtggtctcagctgcggtggaggccgaggtgggaggatcactggagcctgggaggtcgaggctgcagtgagccaggactacgtcactgcacttgagcctgggtgacagagtgagaccctgtgtcaaaaaaataaaaataaagtatggcttactattatttttttaattgattaaaagtttatttacatgttccagcaaagtgctgtagttttcttcatttaagtgttgtacatttcttgtcaaggttaccgctatgtaatttgtaaaagtttttttcctacttcgaatggattttttccctatcatattttttgagtaattaaaaattgaaaccatctcaaatttagagaaaaattgcaaatacagtaaaaataacttttttgcctccgtaaccatttgaggataaatcgccaacctatatgtcatcatacctctccctttatacagtatgtgtgtcccacaaaatgggacctttggcatagccatgacattcaggaaattaccttagaattcaaatttcatttgttgttctgataaacaaaaataatctttgtaaataaaaaagatggagtttagaatcacaggttacatgtctctttcatctccttcaatctgggacagtttctgtctgtttttgccttcgtgacctggatactttcaaggattacagactagtaattttatagaatatacttctatttgggttgtcctgtgtttcttcattatatgctcaggttgtatatcgctgaaaagaatatcgcaggagtgatgctctgttcttgtcattgtaccgtggcagatggcacacgattgtcaggctgtcttattactgaagatgatcactttgattacttgagcaaggtgataatccctttccagcttctccactgggcagttactctcctgttgtaatcaatacttgttttgtgaggagataccttgagactatatacatatctcattcttcatcaactgttcaatttatttatgtcgtatctgtatggatttatagatccctggttttctcagtagtttgtatgtaaccaccattattgaatttgatgctcagtctgtcctagggttggtcagtgggagcccattcaagctcactcctgtgtctgttagacatgttcctgttattctttgagtacttcctttctttctggtgtgaaaattttaggttcactaaagttatttaatattcttgtgtgaacatttcatttaagttttcttgtttttgtatagacaccttaaggttaaacaagtagctttatttgaaatgtcaattacccctgtaatatggggatcaaaaaatttgttaaaaactgtcagaaaaagctgtgcatggtggtgtgtgtgcctgcagtcccaactactcaggagaggctgaggtgggaggattgcttgagctcaggaatttgagatcaacctgggcagtaaagcgaaacccttctctctctgttaaacacacatgcacacacacacatagatacacacacactcacacacaggaatttgtcagaataaggaaatacttgagcatctatcccagctcatatgtttggattaataaaatgctaagcatcagtaaagaatcaggtatccctgtgtggctacttaattttttttaaattcctaaagtgaaaagtaattatatttctttgcaataaataagaaaggaccagaagagaaacttgattgttgtgtcttttaagccttcaggtccttgtctccaagataattttatagagatttttgagatcaaaattttggcaccttagcgtacaacagtacttggcattttgtagggattctcagggaaagatattattttatgttaggtgaaaggaggagagaaattagaattattcccaatctcttctgtttcctctctctttccttctttgagagagattatagttgaaaagaggaagcagcaaggtgggaaggaacatagatggagagagatgtttaagtttttgaagagatgatgagatgagattttatttttttgtgatggagtctctgtcgcccaggctggagtgcagtggcacagtctcagctcactgcaacctctgcttcccgggttcaagtgattctgctgcctcagcctcctgagtagctgggattacaggcgcacaccaccacgcccggctaatttttgtagttttagtagagacggggtttcaccatgttggtcaggctggtgttgaactcctggcctcatgtcctgtctgcctcggcctcccagagtgctgggattacaggcgtgagctgccgcgcccggtgatgatgaaatcttaattaagactctcaagttttggagagagatgttcaagtttttcatctttccctgagaatgcctacaaaatgccaaatattgtacttgttcactaaggtgccaaaattatgaaattatcttggggataaggaacctgaaggcttaaaagacacaacaatgaagtttctcttctggccctttcttatttattacatacagaaataattacttttcaatttaggaattaaaaatatagtagtcacacagggatacctgattctttactaatgcttagcatgttttttgtgggaataatttttatccctctaacagtaaaatgatgttaaaagcccttgaagaaaatgaaaattatttccatttcatacccttgaagctctgattttattaataattttgttttttgagtgaacaaaacctcaaaatataccagcatggtaaatttattgatttctcctcttatgcctgattgcttatcagtttggttcttttgtctgagaatgatccaattagactaattttttttacaacagggaactttcaccttcttacgctgtgttctcattggagcatcgcacagtctctgcatacgtagagtgtgaagatggcatctttatgtatatcttcttaagtaagctaaactgtcttgagaatgacagtaagtagcacattaagacacgaagggttatttcttttttggcgaatggttctttgtttaaatggagaaacataaggtcttatattgagaggtagatttatttaatattccatacgtataattttaaaaatatttctcctgtctcagaatgaagtgagggttctgctaaggcatctttgtaattcacacctttctttgaacacgctttgcctttattccttattgagggacttgaatgcacaatcatttgtggttttctttttttatatgaaatagaaatttgatcatttataccaaaagttagtgctatatgatgatataaaagttccttagatagaaacattccaggctggatatctgactccttttatcatctgcatgatgtacttagctgtatgtaaaatggaaaagtagcaagtttaaatgactggtaaagttggaggcacactgtgctacctagcggttctatttctgtgtcttcttgagagaaacttttacccatgtgctcaaggatctagataaatggaggtgtaatttattataatagtaatctagataggatctagatagatggaggtggtgtatttattataatagtgaatacgtacaaaaatgcttaactgttcctcagtaagtgaatggataaattgatattattcgtgtagtggaattcaagtaaacaatccttttctccagaatacttagggcagatacagtttggaaattagaaatttttaaacattaagggtaattcagtatgtataccatttattgtataacactcccattgggatttggaaaacacctcataatcaaacatacaattttttttctgtagcaaaatttatgaatattcatattaagtgggataaatagattttaaatgccttcatactgtttgggttaattacactttaaaaataagttatgagaaaacttaagagctttttggagtttagatttttggataaagaattgtggacccacattatatagttcataaaatgaatgaagtagagttacatgtatccatgtggattaatctcaagcttattatgttaagtaacaaaaggaagttgccgagataactgtgcaaataacatcatttatgtgaatttttaaataatagtgagagagagagctctgaagcaaataaggcaaattattggtggcggttttcttactttgttgtatgtttgaatgtgactttataacctcaaacctctgcttttaaaccttctgttttatgttaagaatgtaaggttacattgagttaggcaataagaatgtgctacaaagcatgttagaactggaagagttctttaaaattattaaaattatcatcccttctttttttctttttctttctttttttttttttttttgagacagggtctcaaaaaatatatactctctctatgtaaatatatactctgtcgcgcaggctagagtatagtggcatgatcatggttcactgcagcctcagactcctgggctcaggggaacgtcctgagtatctgggactgtagatgcatgccactgtgcccggctaatttttaaaatttttttgtagagacagtatctgtgctgcccaggctggtcttgaactcctgggctcaagcagtccttcctcctcggcttctcaaagtgtgagccactgcgcctggtctactcttctttcttctaatccaagtcatttctacttgttaagagattctcttgaatatttatttattttccctttttaaaccttacaccttttacttcttttcaaaacatattttggttgagatatagtttccatacagtgaaatgcacacaccttaagtatcttgtttccatgagttttgacaaatgccaacacccgtgtaatccacaattctctcaagatacagaacatttccatcatcccacaaagttccctcgcatctcttcccagttagtatcatccctgccgcccagcacaggtagtgttctgattcctttcactttaattttacatgttctagaacttcatttaaatggaatcatacagtctgtaccctgttgtgtctggcttttttgctccgcatgtttttttacatttatccatattgttgcatgtatccctagttatccttttatataatactcccttgtatgaatgtggtaccatcagtttatccagtcttctgttgatggacatttgtgttgtttccagtttttgatttttatggataaaaccactgtaaacatttttttttttttttttttgagacggagtctcgctctgtcgcccaggctggagtgcagtggccggatctcagctcactgcaagctccgcctcccgggttcccgccgttctcctgcctcagcctcccgagtagctgggactacaggcgcccgccacctcgcccggctagtttttttgtattttttagtagagacggggttttaccgtgttagccaggatggtctcgatctcctgacctcatgatctgcctgtctcggcctcccaaagtgctgggattacaggcttcagccaccgcgcctggcctgtaaacatttttatatggttgtgtttattggtacatgttttcatttctcttggggtaatacctaagggtggaattcctgggtcctagggtaggtgcatacttacctttatgagaaactaccagaccaattttcagtgttggttgtgactgcttcccattcttgccaacatttagtattgttggttgtctaaattttagccattctagtgggcgtgtagtatcttactaagtggtatcttactatggttttgatttgcatttccccagttactaaagatgctagtcactttttcatttacttattgtttagttagttcaattgcttattgtccttaggagaatgttcatcttccccaggaatgtatttttctttttgaagtatctaaaaaccacttaaaaaaaattttttttgagttgtagaagtagtttatatattctggatacaaggatacaagtcctttaacagttatatgtggcatgccaattttatttttatagtggtctctttccttttaaaatttttcctcatcactctttccatatgatataatggtctcttttgataagcagaaattaaaaattttgaagtctaatttgtgaatttaaaattttatcattagtacttcctaacatagccatccaaatatcttccccttaaagtataaagtctgaagctggtcatggtggttcatacctgtaatcccagcactttgggaggccgaggctggcagatcacctgaggtcaggagtttgagaccagcctggccaacatggagaaaaccccgtctctactaaaaatacaaaaactagctgggcttggtggcggcacctgttatcccagctactcaggaggctgaggtaggagaatcgcttgaacctgggaggcagaggtgcactgagccgagattgtgccactacactccagcctgggcagcagagagagattctgactcaaagaaaacaaaaaaaaaagtataaagtcagctgaagtgatgtgaaagcttttgtgatcatagacctaagcattagaattgcaaatataacttggtgtgaaagctctgcagtatggatgcagaaattaaatgtctgtctggaattaatggtaacaaacgtatttattggggtttgtgtgatagaattggcagataaccagaaaaacaaatttattttccttttaaatatgaaggaaaatttatgaaggaaaagcaaatttattttccttttaaatatggaaacatgaagtaatcttgttaggcaaacctacattgattgcctttctctgcattaatttctcagaaattttcctcattaattttcttgagctcttctatctacttaatgtctttacaaacacatatgcaaaagagtctcagacacatcttatttgatgattgtcatggagaatattaagggtttttgtacaaatgtttgtgtttatgccgcggtgttttgcttccaagaatttatggtcttctctatgcaagttttatcatttttgttgtcaggtgtttttatttccaggtcctttctgtggttttttttgtttgtttgtttttgtttttgtttttaatttttacttttgtttttgagacagaatctcactctgtcacccaggctggagtgcagtggtgcaatctcggctcactgccacctctgctttctgggttcaagcagttcttgtgcctcagcttctctagtagctgggactacaggcatacaccgccatgcccagctagtttttgtatttttagtagagatgggattttaccatgttggctacgctggtctctaactcctgacctcacatgatccgcgtgcctcaacctcccaaagtgctgagattacaggtgtgagcctctgtgtccagccaataaatactttaaaaataaatgttcaggccgggcgcggcggctcatgcctgtaatcccagcactttgggaggccgaggtgggtggattatgaggtcaagaggtcgagaccatcctggccaatatggtgaaaccgcgtctgtactaaaaatacaaaaattagctaggcatggtggctgcgtgcctgtagtcccagctacgtgggaggctgaggcaggagaattgcttgaacctggaaggcagaggttgcagtgaggcgagatcacaccactgcactccagcctggtgacagagcaagactgcgtctcaaaaaaaaaaaaaattttttttcagcagtgtgaggaaaatatacataaaatataagaacaataaaatgctactgtctgagagatgatgtggcttatacctgaacgcagcaccgaagtgggcagataacctgaggtcaggagtttgcgaccagcctggccagcatggcgaaaccccatctctactaaaaatacaaaaaataggggatggtggtgtacacctgtaatcccagccacttgggaggctgagacacgagaatgacgtgaactctgaaggagaaggttgcagtgagctgagatcacactactgcattccagcctgggcgacagagtgagacactgtctcaaaacagaaaggacttggaaataaaaacagctaacaacaaaaacccgtaacagagtcatttattatcattatcaagtattaagtactgtatataattgtatgtaccacacttttatatgaccggcaatgcagtaggtttacattattgcaaacacatgggtaatgtatgtgttacaacagtatgatgggtgtgatgtgataggaatttcccacccccccgacccgagatggagtcttgctgtgtcgctaggctggagtgcagtggcatgatatccgctcactgcaacgtccgcctccagggtaagcgattctcctgccttagcctcctgagtagctgggattacaggtgcacaccactacacccagctaatttttgcatttttagtagagacgggctttcaccatgttggccaggatggtcttgatctcttgaccttgtgatccacccgcctctgcctctcaaagtgctgggattacaggtgtgagccaccgttcctggcctgtgataggaatttttttagcttcattgtaatgttctgggaccactatgatacatgcagtctctcgttgactgaaacgtcattatgtggtgtatgtagaatgcatttatgacagtaggacttccccattttcatagcgttttcatttgttcttttttttttttcccctgagacagagctttgctctgtcacccaggctggagtgcagtgtcatgatcttggcatccttcaactccagggtgcaagtgattttcctgcctcagcctcccaaattgttgggattataggcacctgccaccgtgtccagctatgttttgtagttttagagatgaggtttcaccatgttggtcagactggtctcaaactcccccaccccaagtgatccacccacttcggcctccccaaatgctgggattacaggcatgagccacggcacccgaccacattttcatttattctttaacttctgttctgggttgtggtggcataaagatggattatgtctattgctgaaataaacctgttgtccaaattttgatgttccccagcaattatcttgctacttagatttatgtacagcattcgcggagcagaaagatagattatcttatttttcctggattcagaggcagagagtagttgttagaattctagtggaattgcttgttcattttcttgactctgacattatttttagaggagaatgactttggttactaagctccagataatgggtgagaatgttaaacaatttaatccacccattcgagttctagtgtgggtcttttttgcattttggtgagtctcctgcttgtgtttagattagtctgaaaactttgatttggtttaatatttgagggctttcagtgtgctttgctgtacagaaaataaatctctgtcattaactcaaagaatactgaactaacaataaggaggagtaaattaccttggaggctcttcccctgtctcattctctgtggttcagactcgttaaattaatttcttcttttaaaatgtttgttttaaaatgatggaaactagaattcagttgacgtttatacaaagtggggggttatatctgtatataagttttgactccccccagatttaactgttaatagcctactgttgaccagggcctaactgatgacatagttgattaacacatattttgtatgttatatgttaacacgtattttatgtatatactgtattcttacagtaaagcaagctagagaaaagaaaatgttattaagaaaattgtctgggtgtggtgcctcatgcctgtaattccagctctttgggaggccaagacaggcagatcacatggtcaagagattaagaccatcctggccaatatggtgaaaccccatctctactaaaaatacaaacattagccgggcgtggtggcgggcatctgtaatcccagctactcgggaggcagaggcaggagaattgcttgaacctgggaggcggaggttgtagtgagccgagatcgtgccattacactctagcctgggtgacagagcgagacgccgtctcggggaaaagaaaaaaatcacaagcaagagaaaatacatttactattcattaagtagaagtagaccatcacgaagatcttcatccttatcatttgtgtgttgagtaggctgaggaagaggaagaagaaaaggggttgatattgctgtcccagggatgacggaggcagaagaaaatccatgtgtcagcagacccttaaagttcaaacctgtatggtacaagggtcgactgtactttgttttcatagagatatattaaagttttatgagtttagttcatagtgatcttataggttctaagcttcatttgaatatgttgcatgtaaaataagtgctttatctgtgttccttttgtctttcttgactattgttgttaatttaaaatttgtaataggttataactcttaggttttacccatttgtgagctttatttttgggtaagaactttatcctgtacttttgctgtgctttgtatagtactgtaactatgaaagatctttgttgactgttaattatctgaaaatgcttctttttgcttcaggtcaaatattgaataaacctagagcatataattaacatatttattaggactgtggtttgtattttggccagcttggatttaagaattatttgtattggttgatgttgaactgttttttttttctttttcttttctttttttttttttttggagatggagtctctctctgttgcccaggctggagtgcagtggcaggatctcagctcactgcagcctctgcctcccaggtgttagcgattctcctgcctcagccacctgagtagctgggattacaggtgtgcaccaccatgcctggctaattcttgtatttttggtagaaacggggtttcaccatggtggtcaggctgatcttgaactcctgaccttgtgatccacctgcctcggcctcccaaagtgctgggattacaggtgtggtgatttttttagaataagagtaattcactgcattatttttttaaggaataggtggtataacttcccagatacttgaaatgcagctaatatacagtagccatttactttcaacataatttctcaacatttaacttttgtcagtttttcatcaaaaatttattgaggacttatagtagtcaagtactgtgctgtgcccagggtaagaagatgacagtcctaagtcctagaaagttcattggtgataaataccaagaattaaattgcagatcagtctgataagtgctattctgtggataagcatacagccctgggcagcacagatgaggacatcagatagcctaactaaatgggaagcttgacttggttgacttaagaattatttaaaactcttttgcatgttacagtaataaagtttatttaatacatggatttatatgtttcagaaaaaaatgttcttaatttaacatttataaaagggtagagtgctggtgttttctctgactctgatcttcttgataaacagtgtactgagttctctgtgatatgttttgcttgtaatcatgaccatttcacgtatccacatttttcttctctctaaaaatgtctctagactacatagttctgttattttaggaatgagaataaacgggatcaaagtgtactcttgttctaagaaactagtgagtttatttgttggaagttctgcctcagaagagcttctgatatttatctaaaatatatgaatagtagttgtgatctgtcattgttttttgcagatatattattgttgtaataaaagccataggccctgtcaagagagttaagaattttcattattgttgttcacaatatcctgccatttcattgagatatagcttggtgtgataatagtacagtccctggagtaaattttaggcaaatactttcccagcatttcaaaatcaagctgagtgtaagagtgagaagtggactagtgggtgttgctgtaaaatttggagtgtgagatcattttgcagtgtgtcgggaccagacttcccaaacagacattctagtattatcttacagctagatctttccttaaactcaatgtatctgtttttggttgatcattatagatggctgtgatgtgtgaatatgcccattttatcttctgtgtgaatacgctggagaaagagtagccttgcttgtagtctgcttttttccttcttcttcttccaaaggagttggcaggaatttttataaaataaagctagcctgattgtagccaaaagaggaaatgttggtttatattttagtggagaaaactgctgtatagacttctaggctaccactcagcattgttgtatttttatactctagtaaaatgggtgcgaacagagctgaagaaccagacacactagtagttaacgttttctttctttaccgaaatagtaattgccatgctacatttagccatatgtgccaaagcgtatgtgaaactattagctatagccagtgtatatttctcctaacctgaatgaatggatgatgaatgttcaaaaaaggaggaacagtcatacctagaaatcagcttccctgttgaatgtaacttctggtatttccctttgggatctattcactcaggagtgtcgggatattttgttgacttccaagggaaagaaactaggctttcagagagttagcattttgatacatctttttattgagggtcttttgaactccagcaactgttaatcattaaaagatgatgctggtagtgaaatgcatttttaaatttatattcatgaatttaaactcctgattttttttttttttttttttttttttggtgagtttattctacgaaagaaatagcagtgcttttcaagtgtttaaagactaccataattgaaagttcactacttgctaaaagcataatacccaaactggaaatgataaaggaaaatgtcattgtctttgtattaaaaaagaagatatctattaaaagtcatcataaacaatgttaaaagaaaaatggcacacttggaaaaatatttgtaacatacacagcaggtgaaagattattttcctaatacgaagagctcttaaaatggattaggaaaaaatattcaataacaaaatcggcaaagaacgagaagggaggagtcccaaaagtagatacacgaagatacacgtagaaatgatttgtagtatgtgtcggaattacaattgtgcacacttaagtagatacacgaagatacacgtagaaatgatctgtaatatgtgtctgaattacaatcgtgcacactttgcgatccagcaattccatctttgagaattcccaagaaaaatgtggatttatgtgtaaagatgcatatgtgaaggtgcctcttacaatagtgaaaaatgagaactaacctaaaatatccatgagtgaaattttatgacaaatatcttctctccaaccaattttttattatggtaaaatacatatacaatttaccgtcttaaccgttttgaagtgtacggtttggtggcattcagtatgtcccatctgtcttcagaactcttctcgtcctgatgaactgaaactctatacccattaaacaataactcctcattctgtccccctcctgcatcctggcaaccacacttctatttcctttttatcaattcgactgctctagatacctcatgtaaatggatacatacagtgttggtctttttgtgattggcttatttcacttagcacaatgtctttaaggttcatccacgttgtagcatgtgtaagaatttctttcctttttaaggctgaaagacgttggcaggtgatacggtttggccgtgtctccattcaaatctcacctggaattgtatctctcagaatttccacatgttgtgggagggacataggaggaggtaactgaatcatgggggccgtgctattctcatgatagtgaatgagtctcttgagatctgatgggtttatcagggggttacgcttttgcttgttccttattttctcttgctaccgccatgtaagaagtgccttttgcctcccaccatgattctgaggcttcctcagccatgtggaactgtgagtccaattaaacttctttttgtttccagttttgggtatgtctttatcagcagcgtgaaaacaaactaatgctgcaggcaccttgtttccaaaaaaaagagagatttttttgaatggataatgcagatatttataccctcatttaaagtgtgaggaatctgaaacccagaaagacggtgacatgtctgaatgtcgtaactagtcagtgtgagagccagaactaaaactcttgttttctcatcacagtttagtgttcttcccagtgtggtacactgctagaccttgaatcagggaatgatcttttattgttgcttctttattcctaaaaataagatttttgatgtaatagccttttggaattcattgtataatgtactggactttacgtatccattcagattaaaggttcatataccttctttagggacacaagctaaagatatgccctctcaaacatttttagtagtttatctgcattaatacctttatttaattagtcacccatgttgttatcatctcctgtataaaaagctttgcatattctaattaaaaaaactttgctatattattatctttaggtattactagttttgatttctgcaatctgctctgtttttgctactagaggaggaaagctgatttggagttttctttttttcttggttctagatttagtgggctgcaaggattgctttgaatgccagctctatcacttactctgtgatcttggacaagtgcttaaacctctctaacctcgtgccctcgtctataaaattaaataatagtacatgtgttgggtatctaaaatagtcaaattcacagaatcaaagagtgtaatggtagttgctggggtgggggaaatggagagttactaatcaacaggaatataaacttttggttaagatgaataagctctcgagatttgatgtacaacattgtacctgtagtcagcaataatgtattgtacacttcaaagttgttaggagagtagatgtcatgttaaggatttttactacaataaaattaaaaaaaagtccgtgtgtcataatgaagatgaaataacataaaaaatgtgtggcacaatctggcatatacagattacttgttaaatgttaatatttattatttaatgtttataatacttaaaagtcattttatgtttcgctgtcctttggttttgtttgtttgtttgtttgtttgacacggagcttgctctgtgacccagactggagtgcagtggtgtgatcttggctcactgcaaactccacctcccagttcaagcaattctcctgcctcagcctcccgagtagctgggattacagatttgtgccaccacacctggctaatttttatatttttagtagagacagggtttcaccatgttggccaggctggtcttgaacttctgacctcgtgatgtgcccgactcggcctcccaaactgctaggattataggcgtgagctaccgtacctggccaatttttgtatttttagtagagatggggttttatcatgttggccaggctgctcttggtcaggcctggtgatccacctgccttggcctcccaaagtgctgggattacaggtgtgagccctcgcgcctggccatcctttgtattttttaatgaaaaaaaaaatttttttttttaagacagagtttcactcttgtttcctgggctggagtgcaatggtgcgatcttggctcactgtaaccgccacctctcaggttcaaggaattctcctgtctcggcctctcgagtagctgggattacaggcgtatgccaccacgcccggctaacttttgtattttagtagagacagggtttcatcatgttggtcgggctggtcttgaaactcctgacctcagctgattcgcccgcctcggcctcccagtgtgctggaattacaggcatgagccaccacgcccggctgttttgatgaaattttttgaatgaatgtattcatattcctgtagatttcccatttcccatattccctcaactttagtttctgtgtaataccttctattaattttgaacagtgtctttattatagtttatgcaaagtgaggagtgccatacttatttcgcttcctgtcgggaataaactgaagttaaattactgacattttccatattatctcaattattttttaaggacctgtgaaacagaataaggtgaatcctaatttgctagatgcagatttcttgtagctatttttgattcctgcaggctgctctgatttgctacttgaggaggaaagctgatttggggttttctttttgtcttggttctagcacatgcagatgacgatccaggctctccaggatgaattacggatccagagggacctgaatcagctgtttcagcaagatagtagcagtaggactggcgaaccttgtgtagcagagctgacagaggagaactttcagaggcttcatgctgagcatgagcggcaggccaaagagctatttcttcttcgaaagacattggaggaaatggagctgcgtatagagactcaaaagcagaccctaaacgctcgggatgaatccattaagaagcttctggaaatgttgcagagcaaaggactttctgccaaggctaccgaggaagaccatgagagaacaagacgactggcagaggcagagatgcacgttcatcacctagaaagccttttggagcagaaggagaaagagaacaatatgttgagagaggtatgtggctacttttttagttttatgatttattgattatcttttttttccctgattaatcagcatcttggccccagtaaatctacgtgctttgctgtgctagtggaagagaatttcatcttttgtatttaagtgcgtcactgatttctgttgtgatttgccctgttgtaagggcaaatgggatgacattgtctggcatgtatgctggctcagtgactttctgggtcttttctctcttgctcccctgattttgagagttcatttgttgctaaaggggtacaaaaattacttgatttttcactcatctctagatctgttcatagagacaacaaacacaacaaaaccagaatctagagtagctaaccatttaaaaatattaataaaagagagtaagcggttatctcagcttatgtgtgctcataaaagtccttggcagcagtaatggatatttgccctgtggtttccatggaaactgttgccttgctgtaaaagatacgtgataaaaatcgttggctgccatggaggcatagctggagagagtgatgtagagacacagtgttacttatttttaacctacctcggtgactactgataattttttacttttctaaataatgtatcattttcaggaggcataaaggaagaaatcatcttatattgaattaaaaaattaatagccataataacttttctatatatggttggatttcagatatttttcacttttggacaggggaaaataaatccccaatctctgttagtataagtatgaataattcctttttaaatgaaatgtgagggaggaggtttaaaaaatgacatattcccaaagcagcaaaataataattttaaaaaatacttctaaatttgtaggttgttctataatttttcttttgtaaaaagtctgaaatctgtatttacagtgagggcatttttatttttgaagtagaacatcattgtgttttaaaaacataatgttaatacactggaaatccattgtagtaaaattaggaaatagatgaacaaaaatttataacccaaggtattgttacttagtaataattattaatttttgttatgtatatgctcccagtcattttttttaattttaaatttttatttttatttttagagatagggtctcactctgtcactcaggctggagtgcagtggcatgatcatggctcactgcagccttgaaatcctgggcttaggtgagccctctgccttagcctccctagtaggtaggtctacaggtgcatgccaccatgcattgttaatttttaaattaaaaaaaatattttgtagagatagagtctccctatgttgcctaggctggtcttgaactcctggcctcaagcagtcctccctctttggcttctgaaagtgctgagattacaggcaatatgcccatgcctggcccattattattattgttattgttattattattagagacagagttttgctctgtcccaggctggagtgcagtggtgcgatcttggctcctgggttcaaactgttctcctgcctcagcttcccgagtagctgggacaacaggtgtgcacaagctaatttttgtatttttagtagagacagggtttcaccatgttgggcaggctggtctcgaactcctgacctcaggtgatccacctgcctctgcctcccagagtgctgggattacagtcataagctactgcacccagccccatttttattatttatacattccttcattatttctgtttctttttttcttttacaaggatggaatactgtgcatcagcactgttcagtaagactttctgagtggagtgctaattgggaaggggattttataacagggtaagtgtcctttaggaggtgccctttcagtggagatctgaagagaagaagccagctttgccaagtaaaatcatttcatgaagaagcatgaacagttttaaagacctcacaggaaggaattttgaggaaacagagggaggccggagggccagaatatactgtataaggggaagacttaatgagatgcgaaattggagaggtagccagagtcagattcactcgtcacatatttattggacaccaaccatgtgcacagcactaaggatatagcagcaaacaaatccatgccgtctttgagaaaaagtacctgcctttatgatccttgcggataatgcaacaatcttactcaaaatgggagagaaaaccattccactgttgaatcaagggagtgacacaatctgatttagcttttaagatttactctggttgtgctgagaataaaggaggaaggagagaagagtgagcaagggagtatagtaaggaatttaactgctgtgatctaggttaggggaatggggacttgaaatgattgctggagatatacagaatatcactagcatatcaagaagcacagagaattatgggctggcaatgttaggatatccaaaaatttcattagttattgaattattgtccatcttttaaaaaaaactggcatttaatcaattctttttttttttctgagacggagtcttgctctgtcacccaggctggagtgcagtggcacaatcttggctcactgcaacctccgcctcctgggttcaagtgattctcctgcctcagcctcccgagtagctgggattacaagcacctaccaccatgcctggctaatttttgtatttttagtagagacgaggtttcgccatgttggtcaggctggtctcggaactcttgaccttgtgatccccccacctcggcctcccaaagtgctgggattataggtgtgagccaccatgtctggcactcatttaatcagttctaaaggtcacagctttccctgttttaacaatgaaattgagttaagtgttaacactgggtgtcatgttaacagtctctctatcagcaaagcagcagtcctagtatatttatttgcctgtgtattcacaaacataatcgtgtccattcattttgtcatcatttcagctgaggtgtgagcattgttggtattttccacgttaactttgttgttcagtgtttctgcataaatattctgtaagtcagcattgaaacaaaattactgggtatgggaacagttatgaaaacagtttatggtgatatgtgattaaactctggttaaataagtttaaaaaaactaactcttgcaatcagtattaagtaaaaattctagggcgggtgcagtggctcacgcctgtaatcccagcactttgggaggccaaggcgggtggattgcctgaggccaggagttcaagaccagcctgggcaatatggcaaaaccctgtctctactaaaaatacaaaaattttacagagtgtggtggtgcacacctgtagtcccagctctgtgggaggctgacacataagaatcagcttcaacccaggaggcggaggttgcagggagccaggattgcaccattgcactccagcctgggcaacgctctgcctcagaaacaaaccaactgacagaaaacccctaaatgataaagttttgtgtcatgatttatttggaggcatttccactatttcttttcagcacttaaacagtggtgtgtcttataatcagtggcatcttagatttgatgaaataagatagcattaaaatggcatttgtaattcgttttacattttctttatgaacatgattttgtagctaggaggtaaataattctccctccaaaaagccgaaagataaaaagatttcaattaagcattgtattttctgtttatactcaaatcacatttttgtgtgactatttattcttagattttgtattttgctgtagctcctttcatttgattgatagaagagtggggacatctattggacaaatgctgaattacaggcaagacttggtcagtgcggggggcttgacaggtgattctgttaatacaccaacatttgaggccccaactttggtttacagttcgctagcagagggtacctgctatggtatcctctgtggatattttgggtcttcaatccatatacataccaaacattgtctataggccaactaaatatatttcagtatgtgctcctacttatttaatgctggtagatgctattgggattattaaatacaactttgttttaaaacattattgcagcctactagttttttgtctctattttaatcaacataccgtgttagtacaactgctatcatgttaggtttgcaaaaatctttgaggttaaaagtgctaatatttgaatatgttctaggctagggaattctgaatctaactagcatatctgaggactgcttgtctgtattactggcagttagaaggtataagcagaggagactggagaaaagaaacatatgtttacatatatttataataaatatgtacaaagataaaattttttatttacaataaaaattatatttaagatatataaatatgtattatatatttttctataaagatatactttatatatatacatacacacacacacacacacacacagaaaaactagaaaacgaataggaatttaaaaagaaatttttttttgttttggagacggagtctggctctgtcgcccaggctggagtgcagtggtgcgatcttggctcactgcaacctccgcctcccgggttcaagcaattcttctgcctcagcctcctgagtagctggaactacaggtgcctgccaccatgcccggctaatttttgcatttttagtagagttgagatttcaccatgttggccaggctggtctcaaactcctgacctcaagtgatcctcccggcttggtctcccaaagtgctgggacaacaggcatgagccaccacacccatccagaaaagaaaaataaattcttagtttttcatttgtagcaattttggaaaatgacaacaattgcataccttatttatttaagttattcctcctctcctttttttttttttttttttgcaatggaatctcactcttaccacctagactggagtgcagtggtgcgatctcggctcactacaacgtgcccctcctgggttcaagtgattctcctgcctcagcctcccaagaagttgggattacagacatgtgactgcacgcctggctaattttgtatttttagtagaaatggggtttcactgtgtggccaggctggtcttgaactcctgaccgcaagtgatctgctggtcttggcttcccaaatgctaggccaccgtgcctggcccttcctctcctttttaaattacatcatttgtccttcatttccattttgacaaggtgacattttctcagcacagtgctatttaccagagatggtaatgggttcaggtacaatggtgcgtgacactaggcaagttaagatacgaaaaagtgatgacagttctttccatttaccctgccttcttttttatttctgtctccactgtgttgtgagtatgataaattcagaacttgtgtggaggattgaatctgtgaaggtacttcacgaacaacgtggagcttctacccttgaaccaggggtgctgagggctaagatttgaaacttgaaaaaaaattttcagacataagttttactttttagtcacatatactactttctctcaggtgtgcaagtaaaagttgacttacttttacaaagaaacaactagggaaaaggagaattagtacattttgtttctcaggtgtgatggctcatgcctgtaatcccaggactttgggaggttgaggcaggcagatcacttgaggtcaggagttcaagatcagccttgccaacatgctgaaacgccgtctttactaaaaatacaaaatttagccaggtgtggtggtgcatgcctgtggtcctagctactcgggaggctgaggcaggagaatcgcttgaacctgggaggcggaggttgcagtgagctgagatcatgccactgcaccaaaaaataaaaaaccaaaatgtgtttctaacttgtttattttctaactataaattagtcattattctttagttaattaatgagagaaaacatatttcctattgtctaccacagttgaaagtatattatagcaacattaaatggactaagacaaaaaaagacagagtataacaagattcagataattctacctctaattttttcgaatgaaaatgttcagcccaaaaggagtgaaataaagtgaccaaatagcgtattctacttcttacactcctttgaatagtacttctatttccagtcttctctctttattgacagtgcagaaggcatgggcttgatgtgcttggtgggaagggggagcttatcagctcactgactggaagatgtgttcatagtgacctggaaggtgcagccttccgaatgggattttgttttgagcaatgagttttaaaatgtctttgtagaaaagctttatgcctaatgaatggtttaaaatacaccccaagtctttattgtatgcagggaaggattttttttttttttttgagacagggtctgactttgtcacctagagtgcagtggcgtgatcttggctcactgtagcctccgcctcccaggctcaagcagtcctgcctcagcccccgcaagtagctgggactgcacatgagcaccaccacacccagctaaatttacgtatgtttcgtagagacggggtttcaccatgttgcccaggctggtctcgaactcctgagctcgagtgatctgcctgccttggcttcccagagtgtttggatgacaggcaggagccacacacccagtcagggcttcttgttctgtgttgcgtgtgtgcttcctggggtgtaaaaacgaaatgacaacagtttcaccttaaagtgaatcggtttggagttacccatttggaattaggtaatgctaacaaggagaaatcagatgaaataagttgaaaatggaaattgtgtgttattttttaaaaatgcagttttaatattttcaagtagatatagaaataccaaatacaaatgttgtgaagttataaaattttgttaatagatgaagattgtttacagttagcagagttcattttatttttactcagtttaaagtttgacattcattgattgaacaaatactattaaatgtctactgtgtgcccaatcgatcaccttgtagtgtgcagaacagattcaacgtggacaaactgtaaactgggaggaggccgatgagtttgtcgttttaaggcaggccagagattattatggcttaaactaattaatgtgttaggtgttgggatggaagaacacaaataattttaagagattttaaaaactatttttggatacaatatagaatacatgtagaaaatagaagaaaacaggcgtatcgataagtgtaaattataaagtaagcaccctcataaccaccacctagcaacagaacttccacatccacccaaaagtcccgtaggtgaaacagcccggtcagaactctccgtctcctctaaaagtgaccggtattctggattttgtagttatcatgcctttgctttttattgtatttatcacatctactccttaatattatggtattgttatattgtgttatatgttaaattaatattcccaggtatcatccctaagaattacggctttgttttgtctgtgtttcaaaaagatgcttcaaatctgttaactacagagttgcccttaattcctccttttttctgtcatgcagttcgagcatttcttggcttattagctggaatgacaattccgtcatctctgtaccatccgtgttggtttcagtggagtgacttgcttccgtcatctctgtaccatccgtgttggtttcaggggagtgacttgattccgtcatctctgtaccatccgtgttggtttcaggggagtgactggattccgtcatctctgtaccatccgtgttggtttcaggggagtgacttgattccgtcatctctgtaccatccgtgttggtttcaggggagtgactggattccgtcatctttgtaacatccgtgtttgtttcagtggagtgactggattccgtcatctctgtaacatatctctgtaacatccgtgttgatttcaggagagtgactcgattccgtcatctctgtaacatccgtgtttgtttcagtggagtgactggattccgtcatctctgtaacatccgtgttgatttcaggagagtgactcgattccgtcatctttgtaacatccgtgtttgtttcagtggagtgactggattccgtcatctctgtaacatccgtgttgatttcaggagagtgactcgattccgtcatctctgtaccatccgtgttggtttcaggggagtgacttgattccgtcatctctgtaccatccgtgttggtttcaggggagtgactggattccgtcatctctgtaacatccgtgttgatttcaggagagtgactcgattccgtcatctctgtaccatccgtgttggtttcaggggagtgactggattccatcgtctctgtaccatccgtgttggtttcaggggagtgactcgattccgtcatctctgtaccatccgtgttggtttcaggggagtgactggattccgtcatctctgtaacatccgtgtttgtttcaggggagtgactggattccgtcatctctgtaacatccgtgttgatttccggggagtgactggattcctggttataggcccttttgcctgctttgtgtgtatagaatgtgttgtatgatggacattatggacacaaggtgaatgagtatctggattttggtatcttccttaatgaagggttgttttgtctagcaagagttaatttacttggggattaacttgatcctttcaagacttgcttttaaactctgttagggctggtttagaatagccttttctctaggctacattagcgctactcctaaggcttgaccttttagtgtctctactaaatgcctctgctgttcttcccactatttggaacttgaatttttcccagccctatgagagttcaggcagttgctcaactcatggctctctgatagttgctctttccccagtagctcttgattttaccttgtggaggcttgccctgtccatgcacgccttagtgtttggccaaagactcaaggggacctttgtcaggtgggacactgcagcttttctggtgagcatccttctctgttttgtttttaattttttttttttttttttttgaaacagagtctcactctgttgcccgggctggagtgcagtgtcaggatctcggctcactgcagcctctgccccgcaggttcaagcaattatccctcctcagcctcccgagtagccgggattgcaggtgcccgccactgtgctcagctcacttttgtatttttggtagagacagggttttgcctgtttgccaggctggtcttgaactcctgacctcaagtgatctgcccaccttggcctcccaaagtgctaggattacaggcatgagccatggtgcccagacctctggtgttttgctttgcagattttcacagattaatgggaaccttactcattcaactgtcttgggagctttgcaagactactgttcttcgtttgagcttcccctctctacgtcacatactagacatatctgggccatcaccttgttcattttctctcaaggatcatagtcctgtactgcttgttatccagggtctgaaaacagttatttcatgcatcttgtttaattttataatagtttacgacaggagggccagtctcacatgatggtcaaagtgagaagtataatggtaaatttattgaaagatttaaaacagattactgccatgatttgtggatgtattatcaagatcaccctggtgctctcttgaaaatagacaaaggaggtggaaaaaagctaactagaggctgttgcaagctagactggaaatggggtgaaatggttagactcaagaaatactttcgcactagaacaattaggacctgctgttgacttggttgtgggacgtgaagatcaggaggagtaaaaggagagctctggtgtttggcttgagccactggaatggcagtgccatttaaagagacagagaagactcgtctctcatcagagtcaccagatgatgggtgagattgaagaggaaatcaagaatttttttttgataaaataagtgtgagttgcctattagacatctaactagagatgccaagtgggcagttggatgtatgagtcctgaaatcagagcagagggcaggcctagaaattcatcagcatttctattgtattttaaaccatgtagtagattagagagtttagatggaaaagagaaaaaggttagaactgatcacctggtcactggtctaatttagacctggaggtctaatttagaaggatgaacctgtgaaggaaacagagaaagtgtaattggagagaaagaactaaaaacaggagagtgtgatgtcataatagtcaagagaaaagtgtctaggagcggttgggcggttgctttgagtgcttctgagagttccaggaagatgaggacagaaatgtgttcattcgagttggtaacgtagaatttgttggtggtcttgatgagttgtttcaatggaggggtagagaaagaagccagattaggctgcttttatgaggtaaagggatcttgtatgtctgaaatattttaaaattaattaaaataaaaagtgaatgggagagggagaggaggaggaagagacagcaggtgtggaccggcgggcttcggtgtggaccggcgggcttcggtgtggaccggcgggcttcagggtggaccggcgggcttcagggtggaccggcgggcttcggtgtggaccggtgggcttcagggtgggtgtttgaacaccttggagttcacaaaggctttccagtggtgtgtgggcagtggtgtgtgggcagtggtgtgtgggcagtgtgcagggcaatttcagattcttaactcccgcgtgtcattctctgcattttggttcgccgaaaacatacctgtgagatcatcttcccctccctttttatggttgtactttgcccactctaactcctgttcatcctccagctctcaggtgttccttaggaaactttacaagatcccaagactacgtcaggatctcctgattacgcttttatagtattgtggatattttcattataacactttttacatattatacagttacttaaaaattattttcttcatttgacaaatacttgagtactatcattgcactatgtattgttctgggtgctcatatacatcagagaataaaaaagaaaaatccctgggataggagagacaaacagtaaatataaaaaaggaatatgctaataaacagttacaaataccaagaaaaaagtagatcttggttagggagattgggagtgtatattagagtcaaatcgtaattaaaaatggagtaaaaagaatgagcctgcttgagactttgacttttttttttttagacagtcttgctctgtcaccgaggctggactgcagtggcaccatcttggctcactacaacctccacctcctgggttcaagccattctcctgcctcagcctccccagtagctgggattacaggtgtgcaccaccaggcccagctaattttttttgtatttttagtagagataaggttttaccgtgttggccaggctgatctcgaactcctgacctcatgatccacccgcgtcagcctcccaaagtgctgggattacaggtgtgcaccactgtgcccagccgagactttgacttttgaacagacttcaacagttaagggaaggagagagcctgtcaaagggagcagtgagtgcaaaggccttaagtcaagagggtgactgacatgttgaggaaaagcaaagaggtgagtctggctggagccaaatggatgaggagagaggagtataagagatgaggccagagaggtaatagggccggatcatgtagagccttctaggtcagcataaggactgtgacttttactgtgagtaaaacgagaagcttttgataattgcaagcatgttttgacttctgttttaaaaagatcactctggatactctattttgaatggtgagatagatttgggagactgttggtgtaatccaggcaaaagataatggtggcagtgtgacggtggaggtggtaattttcaggatatattttgaaaatgggaagagcaggatttcctgatgagttggatataggcgcaagaaaaaaagagactcctatggttttggcttgaacaactggctggatgcacaccatgaatcaaggcacaatgagtgaagcaagttgagaggggaaggccaggaggtcacttgtcgatgttaacagtggggcagatagtcgatatgccagtacagcaaaggtacatacaagtgtggatttcagtagggagtaaacacttgggagttttcagtatgtgcatgatactgaacggtgaataccaagggaatgagtgtaggtggagaagagaagactacaaagaacggacgcttgggacactcctgaggagttgggaagaaaaaaaaccagtaagataggaggaaaagcttagagtgccatatcttgaaagccaagggaagagagtagaataaggaagagggactgagcggttgtgtaaaacgccgctgatagatcaggcacagtgactaaggatacatcgtggtggcagcaacatggaggtcgtcagtgaccctgatgaattatgccgatgattatttgattaaactctatttttcctattaaagcttccatgataaaacacaccaaatatgttatttctcattattatatctccaaagcattgttcctggagtgcaccaatgggataaatacataggtcccagagcctctgggaggactagaaccgggctcagaagttatgtagacaagaataatgcctcgaatcaatcctactcctctgttggtttagtgatgacagtgctgcgtggcacaggcatgttagtgtgttacgctgtcatcactaacactgctcacctccgctggagcccccgctgttggtgtgtccggaagcctgagggggctgctgcctctgccacccattgctggaattgtctgtaaatattcacgtcccggcttcttcatgtcacaagagtctgttttaaagtacgtgatgaatgagtctgattgaggtgattaggtcacgtagctgggctttaattacaagaaaggctgggcagcaagtatgtggcattttcagtttctgctgtgggaagtagactctgccttaaaatgtggagttcccacacagactaaggaggtcagctatcacacggcagggaagagtgatggatgcctgccacagtgcgagataaatagatgaaatagattttgtggggtatatgtgaaaaggtaatagttgaaaccacaggattagggaagggctcttttggatggttatttgtgtgggttgttcacaaacaagagcttcccctaaaattcagcctgtgcttcgtggtgatgtcgcgtctacccaagaagggttccttttttaaaaattcacataaagttgctctgtggattagtgaaggctttggattcaggctatagaatccagatgttccgaggacaggaatttagaaaacgtctgcaggtaggaaaggaaaagagggggaataagaatttagagctgggataattctttaatggaagccacttggaaactttaaagacgttccttctttaactctgtggttaattttttttttttttcccggtaccagctagagtttgcaaagaaggtgaactgacaatagctattaggtttagaaacaaggaggttttttatttgctattttagagtatgtggttcagcagagaggtgaggatagaaactggctgatcattcattcatttatcattcattccttcatctaacaaaagaggaacagatagggaggagaagtaatttttaatgactgcttacatatcagacagtgcctgaggaatacagaagacggtttctatccttaaagagttcccagtatggtatgttagagaagaaaaattattgctaacagtgtggtaagtgctgacgagctatgtaagctgtgtagcatgctgtatgagaaacaggaggtgcgcaaaattcagcacaggagtaggaagggattgaaatatttcctttctagctaattcttgaatgtttggtagccgtttcattcattcagtattcatgccctaaatgtctgttaagcacttaccagagtggcagctgctgttgtaggtgctttggatccatcagcgaatgaatgaaacaaagatcttagcctttgtggagcgtacattctcgtagagaatagtaagtaaatataatcaataagtcataaaatatgttagagggcaagtgctgtatgtaggaaaaagcagagcaagtaaagggggaaaggacacgtgcgttcttttttggctgtgttacattttaaaataaggtgtaaattatactgaaaacattcaacattcattttgttttcaagcctacacaaaagcagtaagaactgtataatgaatctccctatactaatcactcagatacaccagtttcgaaaatttggccacacttccttcctgtatccttttttctttttcctcctttctttaccaaagattttaaagccaatccctcgcatggtgtcattttcctctgcagactttaatatgcatctctaaaatatatggacattttcttgcataacgagagaacaactaaacctaatactaatacaaaaaaggcatttgagccaagactggaaggaagtgaagtcttcccctagcagcttgtgcaaaggcctcaaggatcaggcgcatgctcagcatatttgaggagtagcagggagtcccgggggctaaagcatatggtgacccagggagggatgagaagagacgaggccttgcaggctactgagaggactttggctctactttgagctgaatggggagctatggcagggttatcagcagaggactgacaaggacaactttatgttcgaaagggtcactttaagtgttccattaagaatacactgtagaagataaggggcgctcagttagaaggctgtcatggattaaaaggtgtatttttgtttagtggttcattccaggtgttggcagtggagacggcaagaagtgcttggattttgggtatgttttaaagctagaggtaactggatttcctgactgcggcttgagagcgagaggaaggcattacgaagactcataggcttttggcctgagtaacaggaaggacggagcaggtttgggggcaccatcaggcgtggagatgacgtcttaccatgttgcccaggctggtctcgaactcctggcccaaagggaccctcctgcctcccagagtgctgggattacaggtgtgagccatcacacttgaccaggagttgagttttgagcacgtagagtttgaaatgtttattggacgtgaaagtgggataactaggcggatagtgaaagctggaagtagggagagaggtggcataaagcgttcatctctggattccctggattcccaagagcctgtccacagggtactgggaagtactgactgatgtatttagagacattcgcagagtctgacaagaaaatcactgaggtggttcggtcatttagagacattcgcagagtctgacaagaaaatcactgaggtggttcggtcacagggaactgggaagtactggctgatgtatttagagacattcgcagagtctgacaagaaaatcactgaggtggttcggtcacagggtactgggaagtactggctgatgtatttagagacattcacagagtctgacaagaaaatcactgaggtggttcggtaacctgaaagactctgatatatcccttccttccttttctatcctgaactcagtaaaatttgggttaaaaaaaaacaacaacaacactctgtttttctgacattttctgaacctgacctacttaggaaacttgttccacagtgtcatctttttcttcctaactgtagcaccactcgagagagatcgtcaccgcaggtaaccaggtggtggtttttctgggggtggatgccgtggaaaggacattgtcaacacagattgtttccatagctgcaatcagcagtgcagactgattgtgatggtgtctattatttctccttttaaaagggagcatttctcatcccctttttggatcgtttggaattccgattacatgtctcggggtcatgtggaagactgactgacacaccacctgaggatgtgaagcagtagtttgaactgttgtggtagctggcgtctgtgtgactgattttaagtaactgggtgttcagaggtagggatcctcctatgcctgcacgggtgagtgagccggaatgcagtctgtggagtccctggttcacggggaagcgttggtaacacggaaggggtccgtgtctcatgaggctgtagtgatcgtttgcatacatcggctctcgctcctctgaaaaaaatgagagcgaacaggagaacactgaatctcttcttgccttttttccacaggagatgcatcgcaggtttgagaacgctcctgattctgccaaaacaaaagctctgcaaacggttattgagatgaaggtaagtgagaatctagtaaagaatcttatgaatcaccttatatttttttttttttttttttttttgagacggagtctcgctctgtcacccaggctggagtacagtggccggatctcagctcactgcaagctctgtctcccaggtttatgccattctcctgcctcagcctcccgagtagctgggactacaggcgcccaccacctcgcccggctagtttttttgtattttttagtagagacggggtttcaccgtgttagccaggatggtctcgatctcctgacctcgtgatccgcccatctcggcctcccaaagtgctgggattacaggcttgagccaccgcacccggcctcaccttatacttttaagtgatcaaaaacttccatgtgtgagtgttaggaaatggcatgtaatagtattttacttatttggagattaagagtgagaatcaatgtcaatgatatcctaaaagaatttcaaaattttttccttttacttgtagaccgtaattcaaattggaccaaaaagagttgaacagaatttctttaaatcagctattcgcaaatgtcttggtcttaggacacctttattctcttaaagtgacagactcacttccttcattttaaaagaagatgtctaccgaataccaaagctgggtaaccatagcttgtcagttgttctttcaggtaaaaacggtgttccgtgaagaaaatactgaattcagcttacaactcaaagcaacacacaagtactgtgcttagggacaaccatcgtatttcagcgcgcagcttcattccgttttctcacacacaatatattaaaagtatatgtactccagagttgagatttatttttttttattttctattttctttttttttttttttttgagacggaatcttactctgtcacccagcctggagtacagcggcgcgatcttggctttctgcaagctccgcctccggggttcatgctattctcttgcctcagcctcccaagtagctgggaataaggtggccgccactgtgcctggctaattttttgtatttttagtagagacagggtttcaccgtgttagccaggatggtctcgatctcctgaccttgtgatctgcctgccttggcctcccaaagtgctgggattacaggcatgagccactgtgcccggccgagatttattaaaagtaatactttttactgcttcttcaaggacagtcttaggtgaagtggtcttttaaaaattttatttcttatttttcacttttttcctacaagtacttgatgtgacaaatattaatgtaatgactacaagtatggtttgatgcattgccttgatttgtgctaaggcactagcaattttactcatcgttgctttatatctttagcgcagacagtggaaaggtcaagtgacatcatagtattattatgaaaatagttttgatcatgcatactttgtgaaatggttgagggtaccctgagggtcccacagaccatcctttgaaaacctctgccttaagttaatgaatatttagaaatctttaggctgttcagtatagtgattaagagcttgctttctaagttaaactccccggattcaaaatctcgcttcacttaaccaactgtaagatacagagcaaatcacctatgcctcagtttctttatcaacaaatggtgatagtaatggtactcatccagtgggtcattttgaggtttagttaaaacatgtaaaaacactttgaacgggacctagcgcatagtaaacattcaatctatactagctgctgctgctgttatttttgttaacaatcttctttctcataaaagcttgtgtagttaggggcctccccccacaactacttcttcatatcctccggaaagctcaatactgtattttgcattgtgggccttcatttaatatttgttgatatgacaagaatatttagttaatggtatataaataattttatgtaaataggtagttatgggaactgttatcttaatttggatgatttcctcttaaaactttatattgtatacatctttattattggtagggaaaggatttaccaaattccaaattagtgggttctgggttctttgtagttaattagtagtcttgagtatcatcttgtaaagggtctttagaatggttcagttacatggtttacctttttcacattcaccacaagtttatctgtcatgttatttcctgatccttgttaacacctaagaatannnnnnnnnnnnnnnnnnnnnnnnnnnnnnnnnnnnnnnnnnnnnnnnnnnnnnnnnnnnnnnnnnnnnnnnnnnnnnnnnnnnnnnnnnnnnnnnnnnnnnnnnnnnnnnnnnnnnnnnnnnnnnnnnnnnnnnnnnnnnnnnnnnnnnnnnnnnnnnnnnnnnnnnnnnnnnnnnnnnnnnnnnnnnnnnnnnnnnnnnnnnnnnnnnnnnnnnnnnnnnnnnnnnnnnnnnnnnnnnnnnnnnnnnnnnnnnnnnnnnnnnnnnnnnnnnnnnnnnnnnnnnnnnnnnnnnnnnnnnnnnnnnnnnnnnnnnnnnnnnnnnnnnnnnnnnnnnnnnnnnnnnnnnnnnnnnnnnnnnnnnnnnnnnnnnnnnnnnnnnnnnnnnnnnnnnnnnnnnnnnnnnnnnnnnnnnnnnnnnnnnnnnnnnnnnnnnnnnnnnnnnnnnnnnnnnnnnnnnnnnnnnnnnnnnnnnnnnnnnnnnnnnnnnnnnnnnnnnnnnnnnnnnnnnnnnnnnnnnnnnnnnnnnnnnnnnnnnnnnnnnnnnnnnnnnnnnnnnnnnnnnnnnnnnnnnnnnnnnnnnnnnnnnnnnnnnnnnnnnnnnnnnnnnnnnnnnnnnnnnnnnntgtagcaccactcgagagagatcgtcaccgcaggtaaccaggtggtggttattctgggggtggatgctgtggaaaggacgttgtcaacacagattgtttccatagctgcagtcagcagtgcagactgattgtgatggtgtctattatttctccttttaaaagggagcatttctcatcccctttttggatcgtttggaattccgattacatgtctcggggtcatgtggaagactgactgacacaccacctgaggatgtgaagcagtagtttgaactgttgtggtagctggcgtctgtgtgactgattttaagtaactgggtgttcagaggtagggatcctcctatgcctgcacgggtgagtgagcctgaatgcagtctgtggattccctggttcacggggaagcgttggtaacacggaaggggtccgtgtctcatgaggctgtagtgatcttttgcatacatcggctctcgctcctctctgaaaaaaatgagagcgaacaggagaacactgaatctcttcttgccttttttccacaggagatgcatcgcaggtttgagaacgctcctgattctgccaaaacaaaagctctgcaaactgttattgagatgaaggtaagtgagaatctagtaaagaatcttatgaatcactttatacttttaagtgatcaaaaacttccatgcgtgagtgttaggaaatggcatataatagtattttacttatttggagattgagagtgagaatcaatgtcaatgatatcctaaaagaatttcaaatttttttccttttacttgtagaccataattcaaattggaccaaaaagagtggaacagaatttctttaaatcagctattcgcaaataccttggtctcaggacacctttattctcttaaactgacagactcacttccttcattttaaaagaaaatgtctaccgaataccaaagctgggtaaccatagcttgtcagttgttctttcaggtaaaaacggtgttccgtgaagaaaatactgaattcagcttacaactcaaagcaacacacaagtactgtgcttagggacaaccatcgtatttcagtgcgcagcttcataccgttttctcacacacaatatattaaaagtatgtgtactccagagttgagatttatttattttattttctattttttttttttttttttttttgagacggaatcttactctgtcacccagcctggagtacagcggcgcgatcttggctttctgcaagctccgcctccggggttcatgctattctcttgcctcagcctcccaagtagctgggaataaggtggccgccactgtgcctggctaattttttgtatttttagtagagacagggtttcaccgtgttagccagatggtctcgatctcctgaccttgtgatctgcctgccttggcctcccaaagtgctgggattacaggcatgagccactgtgcctggccgagatttattaaaagtaatactttttactgcttcttcaaggacagtcttaggtgaagtggtcttttaaaaattttatttcttatttttcatttttttcctacaagtacttgacgtgacaaatattaatgtaatgactacaagtatggtttgatgcattgccttgatttgtgctaaggcactagcaattttactcatcgttgctttatatctttagcgcagacagtggaaaggtcaagtgacatcatagtattattatgaaaatagttttgatcatgcatactttgtgaaatggttgagggtaccctgagggtcccacagaccatcctttgaaaacctctgccttaagttaatgaatatttagaaatctttaggctgttcagtgtagtaattaagagcttgctttctaagttaaactccccggattcaaaatctcgcttcacttaaccaactgtaagatacagagcaaatcacgtatgccttagtttctttatcaacaaatggtgatagtaatagtactcatccagtgggtcgttttgaggtttagttaaaacatataaaaacactttgaacgggacctagcgcatagtaaacattcaacctatactagctgctgctgctgttatttttgttaacaatcttctttctcataaaagcttgtgtagttaggggcctccccccacaactacttcttcatatcctccggaaagctcaatactgtattttgcattgtgggccttcatttaatatttgttgatatgacaagaatatttagttaatggtatataaataattttatgtaaataggtagttatgggaactgttgtcttaatttggatgatttcctcttaaaactttatattgtatacatctttattattggtagggaaaggatttaccaaattccaaattagtgggttctgggttctttgtagttaattagtagtcttgagtatcatcttgtaaagggtctttagaatggttcagttacatggtttacctttttcacattcaccacaagtttatctgtcatgttatttcctgatccttgttaacacctaagaataaaacacacgaatgtacctgtgttcacaaaattatttgtttaaccaccttttgacagaatgaggatgagtagtagtagtacttggtggcactggatgcattttaagttgtgggaaccttcagccgttctgctaagaaggagaaagattctggtggcccagtggggtcaagaggatgcgatgctgaaatcacaacagaaatcgctgtgttgctgagaacgtggaatgcgcctaagagaattatgaaaatctagaatagtctttagggaaagtagggaggaaagatgactgaagtaaaagagccccgtcatcttcaaggtgatgccattttcttcgccttctcctctttcgcctcttcttcctcctcctcttcttcctccctttcctcttcttatcccttctcccaccattttccctcattccagcctttccttctttgccccccttcttctgtttctcctcctcccctttctctgctatttgtttgtttgtttgtttttccgtcaccggtggaggaacagggaagaactgctgtactgctctaggtttgtttgtttttccgttaccggtggaggaacagggaagaactgctgcactgctctagggttagagtgttgctggtagagataaggcagagtgattgggatgcaaatgaattgagggtgatcatgacagagtagtttggaggttgggcctggactgtaccctggatgtggaaagaataaaattcaggtggactgacaggttgggagaaaatgtaaaagtcaggaaagtggaattctctttgaggttgaacaggaaataatcagagtgagggtacgacaggcctggggaagagagttctgggtgttgataggatccagagtacaatcctatgaactggattgctgaaatggactggaggatgagatcattgcaattaaggacgtcaaggaattctgtgcaatcctcggattatggcaagagtggtgattgaaggggatattgtaagccaggtgccaaagacttccaaaaatgggcaggagtgattgagaagtccctggatggcagcaatggggaggggagggtgaagaggagtatgagttttccataaagggaaacagccttgaggagctgggagaatgtcaaccgtttcccctgctcctttgtggtgttgggggattactggccttcactggagagagttcatgggaaaaaggttgagcatttggggatttgacaaagagcagaggatttcagtaagtccagtgggattggttggtcaatgacggaagggctggggctggggaagtacagagcagtaaagtgagaaggaatttatttatttaaatattacacattctaggagtaagaaacctggttggaatgactctcctcaaacccagcattggtaccagttgggttggtgctagaactagttgagcgtatcaggccttaattttctggcctgatttccttggtaagttttctggtcagtcagtacctgcttcctggttttccgagctggaatcatgatccctttttgggaagaaggttttatggtgcatgatttggtagtgagggtgctaatttgtcaaaagctgcctctgtctgtgtttggggtaggggagaagatagattatatatatatatatatatatatatatatatattttttttttttttttttgagacggagtctcgctgtgtcgcccaggctggagtgcagtggtcggatctcagctcactgcaagctctgcctcccgggtttttacgccattctcctgcctcagcctcccgagtagccgggactacaggcgcccgccacctcgcccggctagttttttgtattttttagtagagacggggtttcaccgtgttagccaggatggtctcgaactcctgacctcgtgatccgcccgtttcggcctcccaaagtgctgggattacaggcttgagtcaccgcgcccggccgataatatatttttttaatttgtcaaaagcttcctctgtctgtgtttggggtaggggagaagatagataatgtatttttttaatttgtcaaaagcttcctctgtctgtgtttggggtaggggagaagatagataatgttttttaagggccttgtagagactttctagaagctctgtacaggtacaggctgccatgtgatgtgcggagctggagttctcacctgggactaaattgtcttaagtggagccccagtgctgctggagatacacttcactctttcagctggtccagtttcattaccactcaggctaatgacagaggagaacttacatttaactttcactttctttcatctgtaggctagtcatatgcttatgcctagtattttagtcttttttaaggggctgtgttccgatatttccagagaaatcttatagcaatcttaaaagtaaattttcaggtggtgcaattgaagtaggacttcttataggtcagtcatttcacatgagtaaataaaaatcccggttcagggatagaatgacgctgatagtattaattcagtacaatggattttgaacagatacattttaatttgagtgaatttataaaagaaaattttcgtggtgatatttttaaaggtcatgtgatgagcaagacagaggaatacatcctctcttctcccctcccttgaacctgaaatagctaggtggagttttctcaagataaaccttaatctatcctatcttcatgctgtgagaattaaggagacttaatcaagaaatcattgaggtgaagaagaaaaggaagttaatttcaaaataacttccaaaggaatggtttctctaaaactccaagtgaaataaagctgcacttaattttggctctttaaggcctctgtttcttcggtgagtaagcctatgcgactacagatgtgtaaaactcttcattccgtgcaggagtctttctgtcattcagagcaggtcagggagtctggggagaaacggtgctgcgacaaacaaaatcaagacatcgaatatgaagtaatgttctgttagaaggtgatatttgtggtagagatgatgatttataaggacagtgatttttaaaaattacgaattattttaaatgtatggagaagtgtagacaataaggatttctaacataataaataacaacttaattattccctcatttttctgcaatgggatgttaggtaatttttattattgcacatatcgctgtacacattactgtgtaaatctttggaactcttacttttttcccctcctttggggcataatatgttttttaggggtcaccaaataatgataaaatattagaactagaaaaggctttactattaatattggaaatttttttcaccagaaatttgtaatttctgatgcgaagaaattttaaccagtttttcattgcatttactttagtaatttagtaattattttcaactttaatttaagggattcagaactggaggcagccatagaggaaaaatcatactgtggatatgagtactaatcctcccactcaaaaggctgtaaaggacatattttagaaggaaggcactggccgggcatggtggctcacgcccttaagcccaccactttgggagtccgaggaaggtggatcacatgaagtcaggagttcgagaccagcctggccaacatggcgaaaccctgtctctactaaaaatagaaaaattagctgggcgtggtagtgcacacttgtaatcccagctacttgggaggctgaggcaggagagctgcttgaacccggaggcagaggttgtggtgagctaagatcgcgccactgcattcgagcctggactacagagtgagactctgtctcacaaaaaggaagcaaggcaccaattgtcagacagcattttttctgtatatttgtctatctttattaaatgtaacatctttaaatatcatgttattcagcttttctgggcttttgtgaatactttaatcactaaatcttctcttgtcttcaggattcaaaaatttcctctatggagcgtgggctccgagacctggaagaggagattcagatgctgaaatcgaatggggctttgagtactgaggaacgggaagaagaaatgaagcaaatggaagtgtatcggagccattctaaatttatgaaaaataaggtaatggcctgtgagacttttgattcttaaagggggtttgaaaaattgatgcatattttttacttctctaacaatgataaaactgtattttacactgttttatcaggtttaagggaagaatacttttagcacagttctttcaaatgaaacttctccagatttaaagtcagaattactgacttagatagttattaccagtttttacttataaagacgattctctgtatgaggctacatacgtattttcacggtttaacttttcatatctattagtacttccgaaaaacttccagatgagtttttctcactatgtgaaatatcaagttctttacctcttgtgaattatttaaaaagtcaaaaccctaagaggcttgagatggagtttcgctcttgtcacccaggctagagtgcagtggtgtgatctcagctcagtgcagcctctgcctccatgttcaggtgattctcctgcctcagcctcctgagtaactgggattacaggtgcataccaccacgcctggctaatttttttttctatttttggtagagacggggtttcatcatgttggccaggctggtctcgaactcctgatcctgtgatccacctgactcagcctcccaaagtgctgggattacaggcgtgagccaccgtgcccagccctaagaggctttttaatgaaatgggttacatgacgttccgtttcccctccaaatacggttctgtaaaggaaagccctttctctgccctgtcctgtggggaagatccacttactgtcaggtttattgcttcccatgtgcgtttcaggcgtaataatgacaaagagagatacaccaagacctatcagtctgtgtttgcaatcagtcacagtgttccttgcttgtatccaaagtcatttagtttgattctgtaaactgtttcagcaagttggaggatttagtttatcacaatgataaatttaccacttttgttgtgagttgttaattaaacattatgattgtagttataaagttttagccagaaaataagtgttttccccctttatttcccaattgtattctccaagttcttagaaatgaaaactgaaacatcccagtagtgtgaaggaatgataatcatcacttccccttcagtttctggcttcttgccatggtgcccatacctggcatgtaagtctacagaatattcctcttctaccttcagactctattattaattatttctactaatttcatttcaggtttagaaattaaaaactcacatacccaactttatttcttttttttttcttttgagatggacgtatgctttgtcgaccaggctggagtgcagtggcatcatctcagttcactgcaacctccatctccaaggttcaagcttcagcctgccgagtagctgggattacaggcgcctgccaccatgcccagctaatttttgtagttttagtagagacaagtttcactatgatggccaggcaggtctcgaactcctgacctcaagtgatcttcctgccttgtcctcccaaagtgctgggatttcaggtgtgagctgctgcgcctggcctcacatatccaactttcgatgagtttggatttttcaccctaatttgagaacaaaacgtagtgcagtatgatctctgtgtttgttttttgtttattgattagcacattccagtccactgtggggaaaagaaaacctgtgaacttagagaaactacctatggctctttgaagagggaatgaggggaacagatttgattgtattgtataagttattgttatttccagttaccattctggctcaaaagtaaataataagaagacctaagttgacacataagtgaaaaagaataataatgtcgtgacaggtagaacaactgaaggaggaactaagttcgaaagaggctcaatgggaggagctgaaaaagagagcggctggtcttcaggctgaggtctttgccgtaagatgtacctctttgtgtgcagtggtcccacagtgggaccctgccagctctatggcttctgagtggcttaccctttcattctctgtggttggcagctttgcccattactagcactaaccagcctgctctgctctttaactgactcctgttcaccagcttgacccacatgtcactttgtgtgcagtgagccttcacgtgttctggaagcctcatacctggtactttattgttgcttttatcactctgtggatggtatttcaaagcctgttttttcctcaaccccttactgttgatttatataaatggggccttcttttcttccaggtacaagaatatatacagttgttctaggcccatcacctagaatttgtttgaattggaaactcttgagtaaagtgctttaccttcttatgcagacattatctttaagtcttcagtgagtgattttgccacaaatgttcctttctttaggacagatgtgtagaaagtatttagtaaattaaaattactaagagacttacgtcaggtatctacacctatctagttcaatattctgatgaacttaaaatttcaattcagaacgtaataataaaataaatacagttggccctccatatctgtggattttgcatctgtggatttaaccaactgtttttaattttcagggtaaaaaaatggatgttgtgtctgtactgaacatgtacagacttttttcccatgtcattattccctaaacaatatagtatgacaactatttacatagcatttacattgtgttaggtattataaataatctagagatgatttaaagtatactggaggatgtgcataggttatatgcaaattctacatcattttgtagcagggacttcatcattcattaattttggtatccaaggtgtgtgttggaaccagtcccccatggacccatggatactgagggatgactgaataataaaatagctaagacttgcacacttactataaacattttataacgtgctgagttaggcatattatcaactccaaattatagaagaggaaactgaggtaacaggatggtgcctaggaaaacacagctagtaagaggcaggatttggttttttacaagcagtcttcttccacatactgcttacaagttctttactgtactgacctatactaggctgtgcccacatttgtcaaagtgtcagcaaaaactgcttcagaaaataattgtcggctgagactgaaatacagcatttaaaaaaccaaacttgtgctactttggtagatttgctatttatggtccactttatagtatatattaaaaagtgaaatattttggtggaaagggtctaatttggtttatgggaaccatatattgtcaagagggaaggttgattgataacttcctttttaaaatagctactattagtaatttctgcattgagtcagacaacaggctaagcacatttcacactattttattgaatccataagtagtacagtggcattggtataatttctccttattactgattaggaaactgattaggaaagtaattattcagggacacatagctaacttagttctgatgtgtgattgtctgcaaagccttgtgctcctaagctttgtattatatttacttcccctttataatatcttcctgtctcagtctttaaggaaaatttgtgcttctaaactctgcttttcttttttttctttttctttctttcttttttttttttgagacggagtcttgctctgtcgccaggctggagtgcagtagcaagatctcggctcactacaacctctgactccctggttgaagcgattctcctgtctcagcctcctgagtaactgggactacaggcacgcgccaccacgcccagctaatttttgtatttttagtagagatgggtttcaccatgttggccaggatggtcttgatctcctgaccttgtgatccacccgcctcggcctccccaagtgctgtgattacaggcgtgagccactgtacccggcctaaaccctgcttttcatttaaaacgttttctgtctcagtctttaaagtcaatatagcattatttgaagcttacttaataatgcagatgatgacgaaacagatttttatatttgtttttgatcacatgattggaggtagctggaaatttgaataatctttaagtcatagttctttagctgagaaaatggtaacactttgaacatccccaaaatattcattcgtacaacagatgtatttttgttacagtcagtatgttagggaatggagtaatactaatgggttgtttttattgataaaggaatctcataaaagactccacgctgttacggtgtgtggtaactcctgggtacatactattttgcaggatgaatatagccaccgtttaaaattaccttcgactgatgtttttagtatcctcaggtactttgtatacagtaagcatacagaaatatttgttgaatgaatatatctctaagaagagattttatgcatatgagaaaaatacttaatcttttttgaaacagaaggctaaataggaaatttatttttggtgctcctcaaatgtctaattttaattaatgtgaaatttatttcttcatgggaaattgttctcaaaagctttatcccttgtacctaagattattacaattacaatactttagatacattcaaggttttaaaaataaaaagataactttttgtttcatcagtgacaccgaaattactgacttgtcaaatttatacttccagtaattagtatcttttttagttccttgttaggcggtagacataatgtaaaagcagatgtaatttctgtttacatggcttacatttagggtaaaaaaacttataaaaattcttagaaaacagtaggaatgtaacgaaggtatttgaaagaaaatactttcaatgttaagagagaaattaatcaatacacataacatcaaattataggattttacaaaaccacatatgtataaccttagaagtagctttttaaggtaagaattttatgcaaacttttgagaatgaaaaagatgagatatctacactcatcctgcatttgacccatcgtgttctgaagagggctcacctagaaaaatgaaaaccgttttatcagtacagtggtgttcagtcgcttactgctgtctcagagtcatctaattgaattggaattcctttccctccattccctttctgagaggtttcaaagaatatttagaagacacagtaactgaaaactggacatttacctattgaataagtttagtttttttttctttttttggcgcagggttgggggagatccaagattatgtgatgcaaaaagatgaataagacctgtcatacaattcctgctgcatttagtttcgtattctgtgactcagatctgtcaaagagccagataagaggtgtttgtttgatttcttttttccttaaagtgtgttacttcttttctagattggccaggtgaaacaggagctgtccagaaaggacacagaactcctcgccctgcagacaaagctggagacactcacaaaccagttctcagacagcaaacagcacatcgaggtgctgaaggagtccttgactgccaaggagcagagggctgccatcctgcagacagaggtagagagagttcgggggtttgtggggagctgatttcttggcaccttttcataagcattacctgtgctgtttttgttatgtttagaattgggaaatatgagtaatgttatgattaattctttagcagcatgatcagttactgtgctaaaatataaccatctcatttcagttgttcttagatctaacaagttaaaatgggtgcagtttatgtttttaattatttaaactttcaccaagtctgtacttcaaagtatactctaacagtattaaaaataaaaggataattgttaaagagtaatcattgatttaaaagcttcagttcaacccctggtgaattttctagtcatgaatgacagtgagcttggttacactgtatttggagtacatttaagtgtttttaagttgtgatattatgaataactgtatataggaaactggaatctgttaaagttctagatagtctaattttaaaccacagattattagacagtgtgtcttcatatcctgtttgaaaataaagttagtgtttttagaaattttttttttttgaaatggagtcttgctctgtcacccacgctggagtgcagtggcgtgatctcggctcatcgctacctttgcctcctgggttcaagtgattctcctgccttagcctcctgagtagctgggattacaggcgcacgccaccacgcctggctaacttttgtatttttagtagagacttggtttcaccatattggtcaggctggtcttgaactcctgacctcttgatctacccacctcggcctcccagagtgctaggattacaggcgtgagtcaccatgcccaggcagtgtttttagaaatcttagattatctagactattggctatgacttcagttaggtattgaccatcttcagataggtatatgacttcagatagatatttaatgtgttgctaaataatcccagatcaattcttatctattttattttcaatgatcaaagagaaagagttgatgatgccatgtggatttactgtcttaatataaatatttttttaaaggtcgcagtgaaatcgataatttaagagtagatagagtagttttgctttatagaagaaacagaaggcatatgatgtagattagtttttttttctttaaagaaaattaagaacgtaatttgatggaaaaaaagaatcaggaggaaaagaaagaataaaaacatcatagtcctagaagacaagagtaaggaagaatgaagaaggaacctaaactgtttcatataatatttttatctgtacaatttggggctttgttaaaaatgggagatttttgctgacgtatttgtcatttttcttattaacttacactttttctattttaattatgtttcattttgttatgatatcagctccattctacatcacagagatattttgggtataaaatcatgagatgcagtagtggctgaggctttggctgtaaagtcatgtttactgagtttggacttcatctttaccacttactacgaattgcgtgatcctgggaatgtattgaacttcattacacttcacttttcacatctgtaagatgaagagaatagtagtacttaactcataagtttgttattagaattaaactcgtttatttactgccagtgttcggcacatagtaaagtctttgcacattcgtcattgttatcattttataattcttgtaataaaatcaactaatacatatactgttgagatgttaagagaacatagtatttagatgatctgccttttcttttattaagttaaacttagttttattcagggaattataaatatgaaatcatgtagataatgttacctgcaaagttattcctttatagctttatttttaaaactttttgtgggtacatagtaggtgtatatatttatggggtatgtgagatatttaatacaggcatgcagtgtgaaaataaatgatggagaatgggggtatccatcccctcaagcatgtgtcctttgagttacgaacaatccaattacactctttattttaaaatgtaatagctttagtaatagtttttcatttcagtagcttgagtgcatgcagtacagcggaagggtcagaagagggcgccagtgttctagaggtcaggcatacttccgggtttgctactgtagtagctttgggtggaggtggcaggtgtgcaaaccggagaaccaggcagttggctaatgataatgcaaacatttaaaagcttgtcacagtctaataaatgacttttcccccttggcaatccatgcttctctttgtacccctctcaagtaatgttcttattagccaggtctcacccagatgggcttgtgattggtttcttgtaccatggagaatagattgtatttgttgtcattcacgaatggtttttagtttttagccattgcaggagtagctgagtctcagtgattatttctgtaagttaccagggaaactgctcaaatggaaccgtctcatcataaaagataaaagagtgaaagcttacttctgaatttgggatgattttaagaatgtaatatgtctatttattagcattacttaaaaaattactctggtgacacctgacaagggtcaccttttccaacgcaacttgccagtgttagagcccagtaaaaggcagtttataccagctctttgaaagttttcatgtatttctataatttgctcttagctgatttcatcttcttttctgcaactatcctagactttgatctaacactcagattactaaattaagtatgtatgaaaaaagaacatggatcatggagtttttctttcatttttatttttagagatagaatcttactctgtcacccaagctggagtgcagtggcacgattatattaatagctcattgcaacctggaactcctgggatcaaacgcttctcctgcctcagcctcctgagtagtcaggacttacaggcatgtgccatcacactggctaatttttaaaatttttttgcagagacagagtctcactatgttgcctaggctggtctaggactcctgagttcaagcagtcctccttcctctgcctcccaaagtgctgggattacaggcgtgagccactgtgcctagcctggagtttgaacagttttaaaaatcctttaaggaaaatagttacatttgaaaagacctggttttttttccctattcggggtacatgggatgaggccctctggtgttcgcaaggtacagtatatatggaattgctcccgttttgtaaccgtctcttttaatctgatgactttcacagaggtggtctggatttagtgatacagtggttaaaaggatggttttggagtcagacacaggcttgaaacccagccctctacctttactagttgtgtgaccttagaggagttactttacttctttgtgtgtgtgtgtgtgtgtgtgtgacggagttttgctcttgttgccctggctggagtgcaatggcgcaatcttggctcactgcagactctgcctcccgggttcaagtgattctcctgcctcaggctcccgagtagctgggattacagtcatgcgccactacgcctggctaattttgtatttttagtagagatggggtttctccctgttggtcaggctggtctcgaactcccaacctcaggtgatccgccctcctcggcctcccaaagtgctgggattacaggcgtgagccaccgtgaccatctaggaattacttctttaagcctccctttcctcatctataaagtaaggataatgataataacaacttaaggtttttttggccaggtgtttaattatgttctcttttgaatttggagggacatttagtttattaattattattattattttttgcgacaaggtttcactttgtcattcaggctgtagtgcagtgcctcgatcatagctcactataaccttgaacttgtgggctcaagtgatcctcccacctcagcatcttgagtagtgaggactatagatgcagggctaccactcctggctaattttttaatttgtattttttgtagatatgaggtctcactgtattgcccaggatgttcttgaactcctggcttcaaacagacctcccgccttagcccccaaagcacaggaatcacaggcaagagccactgtgcccagccacggaggaaaatttgaattcaataggttcaaacaattttgaaacaccttacagtttataacactttgatttgatttggtctttattgttttatttgctcttcatagtaatggcatgggtttgacaacataagtattgttgttttgcttttataattgagaattttatgaactgcttattagcataccacttttgattggcacttgaggctactctcgctagtaaccctgggacttttgctatatcagttacagcattctcaagaattaaagttattttcttgttccaaaatcatgatgctatactagggagctaccattaaatgtattttcaggattaattcccaatgtgcagagcagagctgattttatcaataaaccaaaataatgtggactttactgcttcagagtattccagtttttttcccttacttctccaggaaattgtgttttggaattctgtttattataggtaaggaatataatctatatcttagtaacaggaagaggaagtggctcttttttcagaggtgcttgggagatcagcctctagcacaaggtgaggaactgcccttgccctgggatgtttaggcactagagctaggatgctgctgtttgacgagcaccctctgcttgcagtcccagccccgtgccacttgaagctagagtctggcttcttgagcagacttagagttagtcgtacgttcttagaacgagagggcagtttcagagatcgtccggtctttccgtaatttaaagaatatgtatgacagtatctaacctgagtgctttttgtgtaccatggcgggtttgtatactttcattttcccagttaattcttagcgtaaccttccaagaaataagaattgctataacattttacagacagggagctaaaacttcgagagattcaggttacatgacctagtgcccgattgattgaaacccccaaacttttgttcttgatcataatgctgcaattcctccctgtgcagagagagtataaacaacctgctgaaggcctatccaactacttggtcttagttttaggactggaattcatcatttctgattttgcgaattacaatatgcatggatgaccatgactcttgtttgattggtaggttggggactagccacaaagaaaggtggggagaagaagaaacaattcatgttggtggagaggagaaaaggatttaggttgatggaattatacagcctcagaaagagataggcatcttttgtgacaagagactatgagagaagagaaagatggattgattgatctcttcattcattccacggggttttgggagtacctgctgagaactctcctgagcactggggataccgtggcacataaaacagaaaggctgatgatctatatccctatctgtatctattaatgtatctgtatatgtctatcgatatctctgaattagctgctcagaataaaggagaactaagtaccgtgacagagatagggcttagaatcttttcaagtgaatgtgtttttgtcttcctgttgtaggtggattgtgtgaattatggggtagggtaggggttggggctgggtgctgcagggcgacattgtcatgatattcaagtctgcctgtgaaggtagactggctttggagtgctccttcctctttcagcatcctctctataactgggcagagcatttcttgtagaagcggtgcagatgatcctgccagaggcgttctgatcggggaggcttgcttcctgccacagccactcccccagttccagctggtgagatagcactgcttacagaggtgatggggtgatgtctggttcgcgggaagatgtagataatgataagcttaagaagttgacaagaaaatataagcataagtatgtctcttaatacactagaaaaatcaaaatggaatgtataagtttcaaaccatcagagtgaaactcagtttacccagtggagaatagaaaagagtagggaggggagagaaagaaatgtgatggtatgtggacatcatgaacaaagaaggctgaaatcagtacaaataatgggaaagtcaatacatataaataagtacttggattaaaatgaaaatataaatctcagttgggctaaaaagatacagaaatatactgtcaacaagagttaaacagagacaaaaagtaacagcaaagttaaaaacacacgagatagaaaaaaatttaaaaataaaacatcaggaaaataggccttcccaaatatgatttattttaatattaaattatcttttaaggcacacagaacaatgttatatgctgatagatcaagaaaatataattgtgtcaatttatgcatctaacaacatggcatttaaatatgtaaagcaggctgggcacagtggctcacacctgtaatcccagcattgtgggaggccaaggtgagtagatcacctgagttcaggagtttgagaccagtctggccaacatagtgaaaccatgtctctactgaaaatacaaaaattagctcagcatggtggcacgcacctgtagtttcagctacttgagagcctgaggcaggagaattccttgaacccaggaggtggaggttgcagtgagctaagattatgcccctgcacgacagagcaagattctgtctctaaacgaatgaatgaatgaatgaatgaatgaatgaatgaatgaatgaatatatagcagcaatgaggtgaaatagataaatcaacagttgtagttggtcatttggatgtgctcctgtcagaattagatcaaataaacaagcatcaacataaagttttaataacattaacaagctcaagttcatagatgtgtatacagaattttgtactaacaaatagagaataaacaatatttttaagaacttactgaacagccataaaaactaaccatgtactggatcataaaggaaacttcaaaattcccaagagtcaaagtcacatgactttgtactcctaatgcaacaaaattagaaatcaggagtaaagatagtaaagtagttataaagatagtaaagaatagcaacagaaaaccaaaataagtctgcaatcttgaaacatactaccgaaatgacttgtgggttaaaggagaaatataaacattttagaaatgagtggcagtgaaagctctctatataaaaatttatggaacataattagaaaaaaaactatggggtataactaaagcagtatttagagggaaatttctagtttttaacatattcatcagaaaataagaaagaagaacaagtaatctaggtgttcaaatcaggaaacttagaaaaaagtaacagagttaatccaaaaacaataaagagtaataaataaaaggtgagaaattaataaagtagagaataaaacaacaccaagaggtagttatttgaaaaaggttaataagacaggaacagctcttacagatgataaaggaaaagtaactgctagtactacagagtttaaaaataatacaagacaactctaaacaattatattcgaataagcttgaaaaacaagaagaaataaatttctggaaaaatataaaatgacgaataagttcaagagttaagagaaaacatgaataacagtcattatagaaattgaaatggtaatcaacctcatccctttttccctcccaaatcctaaggcccagatggcttttgaggagaaaatatttgatagtttctttttttttctttttctttctcacctctcaagttcacgtgattctcctgtctcagcctttcgagtaactgggactgcaggagcatggcaccacgcccagctaattttttgtatttttagtagagacgaggtttcaccatgttagccaggctggtctcgatctcctgaccttgtgatctgcccacctcggcctcctaaagtgctgggattacaggcatgagtcaccgcactcggcccaatatttgatattttctatcaaatatttaaaaatagtcattttcatcaagttgttccccactccccaagaaaaaaacaagaaagactaatactctaccagaggatatgaggaaaaataaataaaagaaactccatatcaatagatggtataatttaatcctgcagggatatcagttttcctgaaattaatgtatatattcttttgcatttccaattaaacaccaagcagtaggccaggcacagtgactcacacctataatcccagcactttgggaggctgaggcaggtggattatctgaggtcaggagttcaagaccagcctggccaacatagtgaaaccccttctgtactaaaaatacaaaagtagccgggcatggtggcggtcgcctgtaatctcagctactcagaaggctgaggcaggagagtcacttgaacctgggaggcggaggttacagtgagccgagatcacgctactgcactccagcctaggcgacaagagcgagactccatctcaaaacaaaacaaacaaaataccaaacagtattttttaggaattcattttattttaaattttgtaaggatgagttacaaaaagacaaatactatgtatgattccacttgcatacctagagtcaaattcatagagacagaaagtagaaaggtggttacctgcagctgggaaggagagaatgtgggtttaatgggtatagaattttagttttgtaagatgaaatgagttctggagattggttgtacaacagcatgaatatactcaacactattcaactgtagacttaaaatgattaagatagcaaattttatgtctgtatattttactattaaattttaaaaaatttatatggatgaataaagctgttctaacattaaacaaaaagagaagagaaaatgggagaaccctgccctgtgatacatgaaaatgtagatacgtaaccaaacgaaaccaaacaatacacctcagaacagtgcggtaactagcacaggaaggagcaggtagtgaaaagaatagggagtgtgaaatcagaaacatttatgtggagagggagtcagtcataaactagtgcaaaattaagcaagcatgagaaaactgacataccatgtagagaataaagttggccacctacttcattctagatggaaacagtgaactctagattgattaaagacctcagtgttaaagagaaactacaaagctaatcaatgaaaatgtttagtaggtatatattggggtaagagaacttaaatgattctatcaaatttaagcatttctcttcaagaaagaaaaccattggcaaagccaacatatgagattgggagaagagttttttgtagagcctcttaaaatagtaaggattcagataaagaataaaaaagagatgcttgaggccaggcgtggtttctcatgcctgtaatcccagcactttgggaggccgaagtgggcggatcattaggccaagagatcaacaccattctgaccaatatggtgaaaccccatctctactaaaaataaaaaaattagctgggtgtggtggcacgcgcctatagtcccagctactcaggaggctgaggcaggagaagcgcttgaacctgggaggcggaggttgcagtgagctgagatcataccactgcactccagcctggcgacagagcgagactcagtctccaaacaaaaaacaaaaacaaaaaaacgtgaaaatcattaagaaatagagactatagggagagggaaggatttgaatagacagttaacagataaacttaagtggttaactatgccatgatatcgtcgctttcactagtaaataaatgcaaatttcaaagatgatgaaatattctattttgttcatcaaattgataaaaattagaatatgagataacattcagtgcctgtgaggatttgggcaaaccgtaacacaaatgatgtaggtggtttcagtaatcccattccttggtatatttcccagagaaagtttcctgctggtccacaaaaggacatgtataaggatgttcaccacaggattatttgtggtaacaaggaattaaaagcagcgtaagtgttcattgctagggggtgggataaataaaagtatgtggatatgtaccatggaatactatacaaaagtcaaaagcagcgatgcagaagcatgtatacattagaccatggatagatataagtactatccatgtttcccttttttttttgagacagagttttgctcttgttgcccaggcttgagtgcaatggcgtggtctcgactcactttatagtacttgttatatgagtagtatattgtttaaaaaacagcatccatcctgttttttaaaagtaaaaacaggttgaggtatatagcattaatataaattggaaaacatgtatgaatataaaaatcaccctctgtgtttctaagatacatattcaggaacatattaaaatgtattagaatagctgcatattgaaggagggtatgggtattggacataaatggaaaaatagtaaaacgaaacgagtagaactttacctggatcaacgataacgcatggacagcagatagacgctggtcctaaatgagatagggatctgaagccaagacctctgcatacatctagtactctcctgagaaaggttggacgagaaaaaaattcctcctaccagtattagtggcaatatgagagactgactgattctcttgggctttgattttgtggagaaaggtctctcatcatgcaggtttgagttttaatagacataactgctctgaagggacattctctcaacttagtacatgtagattcccacagataaaagcattgcttagaatgaatttacaattccacattagtccatcacttgtggattgtgatctcccctgaaccaataacgggagtaggaacaaatggagcgatcagacacttaggaacgttggataatagagcgagaccatacgttaaatgattaaaggatggactaggaggcatgggagcaccctccagagggataatcagatataacttgttggatgttgtttcatgactgttgagagcaaaagctgaagtagcactaggtatttaatttttatttccttaatttttaatttttatagagacagaacctccttatgttgcccatgctggtcttcagctcctgggctcaagcgatcctcccgactccgcctccattagtgttgtgattgtaggtgtgagtcaccgtgcccagctagcactagctgtttagtatagtgtctttgaatcttggctctgccacttgctgtatgagtgtatacttttttgcctcagttttctcatctgtgagaagaataatagccttacctcttaatgttgtgagaattaaatgttaatgtatgtatatagtaacactcagtaaatattagctgttataattaatgaatgcataaagtaatgatttaaaacatgaggaaaaaacaaaggcactgtgtataaaaccaaccgggttataaaatatcaaaacaggattttagacatgaaatatatagtaactaaagtggaaaactcagtatattagtttaattgcagattatagagagctgcaggaacagttagtgaattagaacatagatctgatgagatattacccagcaaacaataggaaagataggaagacagaaattattaaaaagaactctatggaaattgagcccaacttatatctgtaggagtttcaggagaggataaagaggcaatcttaaaagagagaattgctgagaatttttctgattttggtgataggaatggatccttcaattcaggaacaaattattcttgagcaggaaaatatctacacctacatacaacatagtggaaccataggtaacctgatcttaaaaactgccaggtagaccggacatggtggctcacacctgtaatcccagtactttgggaggtcaaggtagaaggatcacttgagaccaggagtttgagaccagcctgggcaacatagtgagaccgtgtctccacaaacaacagcaacaacaagaaaaaactaacccggcatggtggtgtgtacgtgtagtcctggctactcagaagtctgaggcaagagtatcccttgagcctaagggcttcagggcagtagtgagctatgatggtgccactgcactccagtttgggcagtagagcgagacgctgtctctaaaaaaggaaacaaacaacttgctagggagaaaaaatacgttacctcctaaggattaacaattagtccaacatcagacttttcagttacgacaacagtagtgagaatatggtagtgtaaaatcttcaaagtttagtgaaaaacattggcaactcagaattctgtaccaagctgaactctcaccattcttcagtaaagagagaagaaagactttttctttcagattaatacaaatgagagttgactacccaggatccctatggaaagtactgttaaaagatgtatgttagaaagaagggaagaatgagatgcaagaaaaaaacaggagacaaaaaggcattaatgtaataggaaaaaataatctaatgtcaatataatagtatggcatagaccttacagtaataatgcctttaaagccaaaactcgcaagtcaactgaggtttattcggtaaaggtgaagaatttcagagaaaggtcacaaaaggaagagcttgtctgttgcttctccttgttgatataatgttgctaaataatagaacaggtggaattctgcatctagattgtttctacctgtcaagagcacaggaatgaaataaaggaatatatatttcaacagtggcaaaatgaaaatgaagctcaaggtgtgtgaagacagaaattgtaagaaagcataaagacctctgcaatggccgggcagagtgactcatgcctgtcattccagcacttcggaaggctgagacaggaggatcacttgagcccaggagggttttcacatagagaaagctgtaaggaattctccctttctgggagggttttcacatagagttataaggctttgctgatcttcgttctgataccagaatgaggaagtgttacgttatgtgttggcttaaaggggtcacacacagtaggttggctgactgccatgctgtatcaggtttccagaggccaagagtttcttggggctgcatacctgataccacttattgcagtatacttgtatagccaatactgtgtcgtctttgctatgaattttcaagcgaaagtgagtgaaggtatcaacattaatttttcagaatataaatttgcgaaatgtctttttttttttttaaactgggtactgtggaatgactcatttctaccttgactattttgatatctgagcttttcatctttttgtcaagtgtggggcatcaaacagagctcaatgcagtttgttgaaatagtgctctaaaaagtttacttctgtctggtctgtaatgctgtcagtccatggctcagtgcccttcacctggcattcagcctcccgtctaggtggggacaatgggaaatgcagtcataagatatatcgtttagagtggatttcagcaagtcacttaattagtttgggccttgatttttctcagctttaaagttgggagtttaatttcagttatttaactctttaaaaaattttatgaaatactgcagaatacaggaaaaatgtagaaaatataatagtcagatttaacatacattaaaaagttcttaaaaatgtctctttctaaacgaatcagtggaagatgtggtttaaataaaaattattagaattttaggtttttagaactcgtttggggccaggaataaagatgtggaagctgtggagatggtggttaaagccgtagaattgggttagtttctccagaggaggttccatgcagtgagtgagatgtgaggaggggaaatgacagaggatggagaacactgaaaagatgtgatcacagagttagaaagggaaagtgtcatgttggcaaagccaagagaggaatgataggaaacaagccacatttccatgcaactaattattactactaatgtgcctttagatagatctgtttcttgatttaaaacaaacgaaagttaaggtaggttgagagacttaattgttttcttttgagatggagtctggctctgtagcccaggctggagtgcagtggtcggatctcagctcactgcaagctttgtctcctgggttcacgccattctcctgcctcagcctccccagtagctgggactacaggcgcccgccaccatgcttggcttttttttttgtatttttagtagagatggggtttcaccatgttagccaggatggtgtccatctcctgacctcatgatctgcccgccttggcctcccaaagtgctgggattacaggcgtgagccaccacgccgggccagaattaattgttttttgatcagaagtgaaaggccaaaacagtagggtagccattttctgttcacttccattggtagagaaaaccttgtggacaaaagccttctgtttttattgaagttggcgtgacctgtttgccacagacaaccttggcaagttgggtgaatgctattcctccagctccaccgatgtgaataaacaggtttgattcctcctgccaggattggtgttagggtgatgactgtgtgtcctgctggtctttgaggggttttcctgaatatgttttttgtggtttgtaaaatatggacctcacgcaaaattatactacaaatttagttcactccgaaccacaagatcagtgtagaattcagagcaattaatctagtagtggcaaagtggtttgcgtggtggtttttatctcagatctccagactagcgtatttgaattctgtactgcacgaaaaagcagactaagaaagagtgtacacaggtgatttgaattgaatacttagtaaagaaaagatcatttagtaattaggggtatggacttgggcagtttctgtgtctaatgtttataatatgaaatatttttggtatcaaagcttgtgtttccagccacacttatgctaaaggttggtatgtttataacaagagttcttattcttcacctttttcagtcaccgattcatacttgaccctctctcagtgccatgagggtgtttatgtcaggtcagcattggcacgtttccaggtccgttaactgaaccgtggatccagtatgaagcgcagcttgggcatctgggtaccttgcataaagaagcggcaatgtggggtctcacaagtgttgtcttatgtggtattggtaccatcagaatgaaaaacacttagaagtgatgagggatgttttcctacatacaggtccatggcctgcagagggaacggctttttttctgaaattaatgcttagaggaactgagacacaggaaaattaggtttgagactttaggtttgaatgccttagcttttcacctttataataagaatttaattatgtgtttaggggatgtaggataaaataatttttttttttttaaattgagacggagtttcgctgttgttgcccaggctggagtgcagtggcacaatcttggctcactgcaagctccgcctcctgggttcaagtgattctcctacttcagcctcctgagtagctgggaatacaggcatgcaccaccacgcctgactaatttttttgtatttttagtagagatgggattttacatagttgaccgggctggtcttgaactgctgacctcagtgatccgctcacctcggcgtcccaaagtgctgggattacaggcatgagccaccacgcccggccagttttttttttttaatgagttgctttgttttttgcttttggttagaggtagtagaataatgtatagtatataaaatacagattaacgtgtagtaattagatacaaatgattatgtgatttatttatttttcaaatttctgacatgtatacttttctaaggcgttgacttccttaactgtgtagaagggtcaccagattcggtaagcgcctttaccatcactgatggcctgtaatgggttcagctaataggaaccaaatctgatactgtcaaataggattagtagcgacactgactggcttgagctgcgcctgagtgccagtggataagggtccatgggttctttggcatcttgaacagtctggttgctgaatttcatattccactaaggtctttactctgtggttgcagtccttttcttttaaaggaatcaatattcagtctgttctgacacttcccttttggaccttttttgtttgcgtggtggagtgttgtgatttttactctcttagcaaatttcagctctataatacagcattattaattacacgctgctgtatgttagatccccagaacttactcatttcataactgagggtttgcacgctttgatcagcgtctccccattcctctccctgttcctatccccagcccctggtaaccaccattctattctgtttatttgagttcaactttttttagattccatatgtaagtgagatcataccataacctgtgttatttctgatttcagttttcattgaacgctttttgtccttattatgagttgtgtttttctgcttctttgcatgtctggtgagtttggattggatgccaagcattgtgagttttaccttgttgggtgctaggcattttgtattcctgtaaatattactgaactttgttttgtgatgtgggtaaaatacttggaaatagtttcattcttttgggtctttcatttaagctttgttagatggtaccaaaattgcatttattctaaagctagtcttatgcaccccctgcttggttataagccagatattaaagagatttgcaaaaacttaaaacaattatattcttcttactgttttagggggaacatacaggtttttgaaattttttttttttttttttttttttgagacggagtctcgctctgtcgcccaggctggagtgcagtggccggatctcagctcactgcaagctccgcctcccgggttcacgccattctcctgcctcagcctcccgagtagctgggactacaggtgcccacaaccgcgcccggctaattttttgtatttttagtagagacggggtttcaccgtggtctcgatctcctgaccttgtgatccgcccgcctcggcctcccaaagtgctgggattacaggcgtgagccaccgcgaccggccgaggtttttgaaattaaaatgttactttaagtatagaaatattggtaagttctgtatgataatgttactaagttctataagaggaaaaaaagtgttaaattgtataacaaaataccctgggaaaggatgagggtgacagcacttgtctgttgggggattggaacatatttattaaatggcagcataggaagagggtcttgaaagatgtgttcaacaggcagaattgtttgtaagtgataggggttaaggatattacaagcataggacaagatgaacaatgacaagaaaggatggtatttattcagagaatggcagtactgctggaacagagagccactggaagtggggcaaaggggcatatggcaaaggttaggcagtgcgggtacattgggcccatctgaccatggagggcctcgaattccctgctgggctcctgtgggttagggtggtattagaaaattagtggttaagaatgtgggatctggaggcaagaccgcttgatcttaaatctctgctctgctgcttatttgtagctgtgagatcttgggcctgctgtcttctctaaggcccagtttcccacattgctatgagagagagtgaaattttccacagggagaatgcaagggaggaaaatacgatacctgagaactgtgaggattttaatgtatatacagtagttctcccttaactgcttttttgctttccttggtttctgttacctgtggtcaactgtggtctgaaaatattaaatggaaaattccagaaaggaacagcttacagattttaaatttatgcttttttttctaagtagtgtgatgaaatcttgtgccattctgctctattccaccctggaggtgaatcttccttgtgtccagtgtatccatgtatccacactacctgccccttagtcacttagtagctgtctcggttattagatcgaccgttgcagtatctcagtacttgtgttcacataacccttattttatttaataatgaccccaaagcacaagagtaatgatgctggcatactgttaaaattgttctattttgttactagttattgttgttaatctcttactgtgactaatttgtaaattaaattttattatgtaataggtatatatatagaggaaaaacagagtgtgtgtagcgtttgatactgtctgtggtttcaggcatccactgggggtcttggattatattccttgatgataaggggggattactgtatatggtgacaaaaatacacatgaacacatacaggaaggcccagaagactgtttaattcagaaataaagtagtaaagtaaaacaggtatgattttctttttttaaggagttgatatgagactgaaatcattgcttaagctgggaggaaaacaaaacaaaacaaaaaacagaatagagacgaatgacagaacaagaaggtatgatagatcagaggtaatgctgtggacaaacggtagatttagtaggtgtaggagaaagaaaaggatagtatttgtgattcagaaaaagattttttagagtttgaaagttctcaggtagatctttccagattataattagattaactgtgtatatttattaaagtagaatagaggtaaattacagatgaaggagtcttttgaaggagcacggtggaacttgtggtgaataactacaaatgggagctcgaacaattgttctttactttctgacttggtgagattggttgcatagaagtagttggtagaggccgggtgcggtggctcacgtctgtaatcccagcagtttgggaggccaaggtgggcagatccacgaggacagcagatcgagaccatcctggctaacacggtgaaaccccatctctactaaaaatacaaaaaattagccggacgcggtggcgggtgtctgtagtcccagctgctcgggaggctgaggcaggagaatggcgtgaacccgggaggcggagcttgcagtgagctgagatcgcgccactgcacttcagcctgggcgacagagcgagactccgtctcaaaaataaaaataaaaataaaagaagtagttggtagaaatgtagtttagcagagtgaaatatggcttatctgcatgtttttcctttccagtatggtccagcataatttgtaagtacttacagtagtagcaagtacttattatagcaatctccagtgagactagtcttgttaagaaattttccatactccttaactgagcaggaagtaccaccatacacacagtattggttctcagataccttgtagtttagatacactacacattggatattgcttacctaaaatgcatgggactgggggtgtttcagagtttgagtttgggaatatttgccttacacttatgcttactggttgagcattcttaatccgaaaatccaaaatattccattgaacatttcctttaagtgtcatgtcagtgctgaaaaagttctggagtttggagcattttggattttggattttcagattttgggatggtcaacctgtattagatcttcctgagtgctttgatgtaccctaaatatgaaacattatttatattttctttgtggtttaatccacgttcagataggaaaaataagataagacaagttaaagatgagagaccgtagaaccatacttgatttcttagatttgcactattctctgtggtagccaccagccatttgtggctattaagtacttgcaatgtggctagcccaaatcgagatgtgatataaaggtgaaatatacattaactatcaaagagttagtatgaaaaaatataaaatagttcattaatagttttttgtatggattatatgtttgaaatgacaataatgaaaaaagaatgtaaaacagcttattaacaatttttggcttgaaaatatgactcactattttcctggtgaacagccctgaatcttagataaaagaaatccacttccttcttttcctataatcaaatgtttaactatttgttattaatccttgggtggaaaagcaaaaagcaaatttggtgtgcgaatatgtatggggtgctaaaagcttaataaaattttctgtgaatggattttaaaataaatgtcattagatttcttgttattttaaagttatatctaatgaaaggcattaaacttcagggataaaggtaactagttaccaaactttttagctggttagtcttgccatctaaaagtagacctttgcttttgtactagttaccaaacttttcagctggttagtcttgccgtctaaaagtaggcctttgcttttgtactagtcaccaaactttttagctggttagtcttgccatctaaaagtaggcctctgctcttgcttcgtatggatatctaagtgcattatggggttgtttttcataaacgcttcatagcctgtggctagattgtattatctgagatagccagtgttatgcttggtgatgctttttttcccttttcctagttttagattttctaaagcagtgtagcttcatttgggaacttgttagaaatactcattttgaaccccaacgctgttgaatcagaaacgacggacttgatttaggcctccagatgattctgatgcacatgaagtttcagaaacggagtcgtagaggttccgttgtgtaatggtgagcacgctggactctgaatccagagaaacatagacgtagatgatacttacttttatagagtaacaaaactcaacctctttataacctttataacatatctatttgaaaggaattacattcttttctttttaattcatcacttgtaaaactcttacattcttaggtggatgctctccggttgcgtttggaagagaaggaaaccatgttgaataaaaagacgaagcagattcaggatatggccgaagagaaggggacgcaagctggggagatccacgacctcaaggacatgttggatgtgaaggagcggaaggttaacgttcttcagaagaaggtagggtgcaggtcttctgagttcagtggcccattcctcatacgtcctcactcctaccactaaattatatctaaatgctgtcagagtttcttgctcattcttcaatttatgtttttgtgattagtaatttggaactgttgctgcagtagtaggtagattgttaagattgctgtttcatattcagtttttaaaaattttaaaaactgaaaattgcatattcagtttttaaaaatttaaacacggttagtatcttccagtagtgcttttcatgctgtttctcaaaagtgccttgtaaattgccaaagtgtttgaactgacattctttttccccttctgtcttttattgcaactgtactaaattggtttagtacatggacttgggatggtacagcttcatttatgtgtttaataagatgacaattttaagctcagaccaggggcatccagacaaacacgtcgttcatatatgagccaaaaaatgtgtgtgtttgtgtatttcagtacagatcttactgttccttgccacttgttctttctccttttttcagttaatatgttttgatattctttccaagggtttcttcattgttgttactaataacattgtatggatgtactataattagcaaaatttctactgatggacatttattttgctaaaaatttcttcctttacataaaatgattctgtagtaaaaagcattgtacatatttagttgatacatatgtcaagtcaagtatatttctaggataaagtccttgaactgctgagtgaaaggatatgcatttataattttgatggattttgccaagtagccttaaagagattgtaccaagtttcatttctactatcagtgatgaaagcgatatattcccgcatagttgtctacagagtgtgttaaaagacttttttactttttggcaatctgataggtgagaaaacactgtcagtgtagttgcagttctttcattataagaaaagttgaacatatttttatatttaaaatcctttgtattttctgttatttgattatatgctttacccatttttattttgagttcttttctgcttttttaaaagttggtttgtagaaattgcttcccagtttaaacattaggtcttttgtctgatgtgagttctaaacatttcttcctgtttgacttgtttattgaggcggagtctcactttgtcacccagactggagtgcagtgacacgatctcggctcagtgcaacctctgcctcctgggttcaagtgattcccctgcctcagcctcccaagtagctgggactcccggcgcccaccaccacatctggttatttttttgtatttttagaagagacggggttttaccaccatgttggccaggctggttttgaattccgtggcctcaagggagccacccaccttggcctcccaaagtactgggattacaggtgtgagccactgcacccagcccctgcgcttttttttttttttttaaagaaagatgtcgtccaggctggtctcaaactcctggccccaagccatcttcccatctcggcctcccaagaccactgctcctagctctgtttggcttttgactttgtgtgtgtgtgtgtgtgtgtgttcagacaccttaaagtgaatgttttaagacttctggattttgagacatattacaaaagttatattttagaatgtttcttattttctagtgatattgatctgtctatgtatccattaacattgctttcatttttgtgtttttgtgatatatgttaatagctaattccttccaaggtacttttctttttcagaagtgccctagctttttttttcttggctgtttttctatttgaaatttagagtcagcttttatcatctcctgcctttaattctttctgttgtgttttttattgggattacataaaatgtgtagttactaatttatggagaattgacaagagtagggtgtatcttaccgtgaattcattttttgtttctcagaaatgttttaatgtttccttcatatcgattttatacatttattcagcttattcctaggttttctttttgttacaaagtgttacagttttcattatatcttctaactgcttgtttttttgtacacatgaagccttgtgatttctgtatatcagttttgtacttagtcatcatactgaattctcttaaaggtttggatttttttttttttttttagtgtattcttttggcttttccaaatatgtagtgataccatttctaaacaacgcttattttccagtgttcaattttaatgtatgtccccatttcgtctcttttctacggatgtgtaccagtgcacatgaaaccgcactgcatggtcgtggacatcttcagattatacctgatctgcatgagaatgctgttagttctctcccactaaagtacagtgcttgcttttgtgttagaattgatagatacatcaagaaagtatccatctaaataaaatgagttaaaacttaaacatttttttattgttattttttgtttcaatagtttttggagaacaggtggtatctggttacatgggtaagttcttcagtggtgatttctgagattttggtgcacccatcacctgaacagtgggcaccatacccaatgtgtagtctttcatccctcacccactcccacgtccccttgactccccacagtccattgtatgtttcttatgcctttgcatcctcatagcttagttcccacttgtaagtgagaatatgcaatgtttggttttccattcctgagttacttcacttagaataatggtcttcagctccatccagattgttgtgaatgccattatttcgttcctttttatggctgagtagaattttgtggtgtatatatatatatacatatatacacacacacacaccacattttctttgtccactttttgattgatgggcatttgggctggttctgtatttttaggaattgtgaattgtgttataaacatgcctgtgcaagtgtcttttttgtacaatgccttcttttcctctgggtcgatgccaatagtgggattgctggatcaatggtagatctacttttcgttctttagggaatctccatactgttttccatagtggttgtactagtttacattcccaccagcagtgtaaaagtgttccctcacatccatgccactatctattagtttttgatttttaaatattgcattgtggttttgatttgcatttccgtggtaattagtgatgttgagccttttttttttgagatggagtctcgttctgttgcccaggctggagtgcggtgatgcagtcttggctcactgcaacctccgtctcctgggttcaagcaattctcctacttcagcctcctgagtagctgggattacaggtatctgccaccacaccctgctaatttttgcatttttagtcgagacagggtttcaccatgttggtcaggctggtcttgaactcctgacctcaggtgatctgccctcctcggcctcccagagtgctgagattacaggtgtgagcgaccacacctggccattgttgagctttaatatgtttgttggccatttgtatatcttcttttgagaattgtctattcatgtccttagcccactctttgatttatttgtttttcactagatgatttgaattcctcgtagattctggatattagtcctttatcagatgcatagtttgtgaatgttttctcccattctgtaggttgtctgtttactcttctgattatttcttttgccatgcagaaactttttagtttaattaagtcccatctatttatctttttgttacatttgcttttggtttgctgttcatgaagtctttgcctaagccagtgtctagaagagtttttccagtgttatcttctagaatttttatggtttcaagtcttagatttaagtctttgatccatcttgagttgatttttgtgtaaggtgagagatgagggtccagtttcatttttcacacgtggcctgccagttatcccagcaccatttgttcaatagggtgtcctttccctgctttatgtttttgtttgctttgtggaagatcagttgactgtaagtacctggcttcatttctgggttctctattctgttccattcgtctgtgtgccacgattggttttggcgactatagccttgtagtatagtttgaagttggataatgtggtgcctccacatttgttcttattgcttagtcttgccttggctgtgcaggctgttttttggttccatgtgaattttaggaatgttttttctagttctgtgaagaatgatgatggtattttgatggcaatttcattgagtgtgtagattgctttcggcagtgtggtcattttcacaatattgattctacccatccatgagcatgggatgtgtttccatttatttgtatcatctgtgatttctttcggtagttttgtagtttttcttgtagaggtctttcatttccttgtttaggtattctactgttttttgcagttattgtaaaggggattgagttgttgatttgattctcagcttggtcactattggtgtctggtagtgctgctgatttgtgtacattaattttgtatcctgaaactttactgaattcgtttatcagatctaggagcttttggatgagtctttaggcctttctaggtatatgacctcatcatcagcgaacaatgatagtttgacttcctcttttccaatttggacgtagttgatttctttctccgtttcattgctctggcgaggacttctagtacttcgtcgaatagaagtggtgaaagtgggcatccttaccttgttccagttctcagggaaaatgctttcaactttcccccgttcagcatagtgttggctgtggctttgtcatagatgacttaaggtatgtcccttgtgtgccagttttgctgagggttttaatcataaagggatgctgggttttgttaactgcttttttggggcctattgagatgatcatctgatttttgttttattttgtttgtgttcgttttgatctgtaaatagtaatattttcaagtaatagacttagtagtttcaaaacatttttcacttctcatgctgtcacttctcatgatctcacttgatcattgtgtatttttccccaattgtgcttctcatgcatttacttcttattaggcacaatagcatgttggtaagaaataaaaccagacaacttttagtggattagaagttatttgtaatttttactatgattcataatgcgtaagccttttgggttccgtttcctattaaacttttctttaagtgtaggatattagtaaaatatgaatttttaaaatttcactggttattgcagttgtgaagtttgtgaggaggggagtgatttaattatttggtttaatacagtgcaggtttccgaaggcatctggatgtacaaagacttgactcaccactgtgcccacagcctgtttgtcgccgtaggctgattatacccaaaatgttggtgacatgatggattatcactttattaggtcgtaagtgttaggggcatgtattttacttttataacatttatttttcagctcccattctataaggattacttcatttaaaaccaaagtgttgaaagattgcatgggtcttcagtcattaaattttgcctttcagatcgtgagaacatgacagcaagctactaaaaaagccttagatgattaacgttacaagaaaagatagactggttagaattcaaaggtcgtttgcaagtaacgcatttcttatttttcactaggtaaacatttttagaaaagttttcgtattagtccattttcacactgctataaagatactacctgagactaagtaatttatgaagaaaagaggtttaattgactcacatttccatatctgagtcactagggaggcttcgggaaacttaaatcatggcagaaggtgaagggaaagcaaggcacgtcttacatggcagcaggagacacacacacacacacacacacacacacacacaccgtgcaaatcttgaatatattttctttgtccttcctcttcatccttcacaggaggcagcagagcagaggatcagtaattgtgctctcttcgtacactacagccccaataattcatcatgttacacacttttgtgtgtcttaaaacttaccagatagttagtacagctattttcaaaataggtttatgttattagtgcttctttttttgttttatttaattaattaatttattttttgagactgagtctcactctgtcacacaggctagagtgcagtggcatgatcttggctccctgcaacctccacctccgggttcaagtgattctcctgcctcagcctcctgagtagctgggattacaggtgcctgccacctcgcccagctaatttttgtatttttagtagagatagggttttgccatgttggtcaggctggtcttgaactcccgacctcagatgatccacccacctcagcctcccaaagtgcaggaattacaggcatgaggcaccgagttcggcctagtgctactgctttgtagacaattacctttatgcctgttgtttttcagtgcttagatccttcccattctgtgtactgtttttgttgacgttactgtattaatgtggtcagaatcaacattttgatgtatttccagcaccattgttggctgataaaatagagagagctttaaatttagtatccataaaaaataaaatgaatacagtagatttagagacagtttaaacttctcaagggatctatgtatttttaaaaattacataaaaataactttaaaataagtaatcctttttttcttggtaaaacatgcagttttatgtatttttaggcaggagtaacaactttttccacacttccatccagcgagcaaaggtcaaaacagtgtttattattccagccaccgtatttttactgtttaaacttttgaaattttgtgtaggaccgtggagagaagagtggtgcttacagctgaaacttagttttaatacagtatcatacgtacatatatatcggttgatttttttgttttaatatagtatcatacatatgtatatgttggttgatttgtttgttttaatacagtatcatacatacatatatgttggttgatttgtttgttttaatacagtatcatacatatgtatatgtcggttgatttgttttaatacagtatcatacatacgtatatgtcggttgatttgtttgttttaatacagtatcatacatacatatgtatcggttgatttgtttgagacaggatctcactgtgttgcccaggctggaatgcagtggtgcaattatggctcactgcaacccttgtgtctggggctcaagcagtcctcctacctcacttcctgagtagctgggactacaggcacatgccaccatgcccagctagttttttgtattttttgtagagatggagtttcaccatgttggccaggctggtctcgaactcctggactgaaggaatctgcccacctcagcctcccaaagtgctaggattacaggcatgagccaccgtgcccgacatctttttttcattttgtgttatcgtttatttctgaaactcagccaatatgatgtatagagacaaatacatagatattgacaggcaaaaagtcatggagataaagtgtattacttgaacaagacttcagattgaatattattattatttagttttcattcatttgcctgctttgggaggtattgggaatgacatgggtggtggtagataaaacacagaaaaatttcacctacttaatattacttgaactaatctctgggaccatagtcccttggccatcaccaagactgagaagaattgaatcaagattttgcttgaggggaagggtgttttgaatatcttaggggagtttacagtgcactcacctgcagcttacattacaaagcgttttggcatgggataaaatgttcataactgtgtgtgttatctttaaacagagtctttgaagccattccctcagacagtacaggacattttcctactgaaggaactcagatgcagtttaggtgtacttatatgtggaaacgatccatctcatagtttacttctgaattagctggtagcagcaaccctctgccgtctctcccccagtcagaggcttctcttaacagccatggcagtaaaaatagaacagtggaactaaaatgttttccagaagcagaacctattggtagggaaagaataaattcaaagttgtttacaactcttttatcttcaaaccattacatataaattcatcaaataaaaatagctaatgtgttttgagcagttattaccatttttatttattatttatattgcttatttttggatcatgatatttcaggctttttatttgatgagtcaacatcttaagattcctaatgagaatgggatataaaaaatcattgggtcattgttaacagtgataggtcattttgacagtgtgtgcacttgaaatggtcaatgatacttcacctctgtggttctcttccccaaaatgcacaaccccagtccaattatgaacaaaacagtagacaaatcctagcgaagaatcattccaccaaacacctaactagtgctattcaaaactgccaggcctccaaaaactaggaaagtccaagaaactgccacagccaagaagagcccaaggaaacatgccatccaaacgtaatgacatatcctaggcagtatcttggaacagaaaagtgacagcagacaaaagctaaggaaatgtgaataaagcatggactcttgttaagaataatgtgtccgtgtttccgtgttgatactaatgtaagatgttaacagtacgggaatccagcctctgggtacacaggaactctctgtatcaccttctctgtaccatcctcacctctctgcaaatccaaaacgattctaaacaaaaagtgcatttaaaaaatcaattccaatttggcagtgtattagggttaagaaaaatatagtaacagtgattttgagagagctcaaaattaaaacatttggattgccattcttttcaaatcttggtggacccaaaacctataaatacttcagtgggggagatcagggattttaccttcggaacagtaaggtggtatgaatttaatggggaagaaggaagggtagaaagtagtcaacttaattctatttgtcttctttgcccctggcttcaggatctctctccacaccgtcgcccatttgccccccactgttgaatatctcatgaacaaacaggacagattcgatctaagaaagactcaatgcaagaaatccctgttatattccagtggacagtgttagtggaacggacccctccattcgaactcttaaattctgtttcaattcaggtcattattctcctctgctttccttagaggtttatacaaatcttaggtacaccgggaaaccgtcctctgagccaaggttctttctcagtgccaggcacttttccatgtgaattatattaacaggtagccctgtgagctatgtttctacctaacacagttgacaaatttcagtcctgtttcatttcacacagctgcccaacttctggtggctcagaagacagcaggtagagataaccaagtagccaccaaataagactaggagactttctgcaaaaaagacagctttctgaaatgcttggtgaaactgttcgttagacagaatgtacatcgctgaattaatgatggagtttaaaaatagctcagcaaggctaggcgcggtggcccacgcctgtaatcccagcactttgggagacctaggcgggcggatcacctgaggtcaggagttcgagaccagcctggccaacgtgaaaccccgtctctactgaaaatacaaaaattagctgggagtagtggcagatgcctgtagtcccagctactcgggaggctgaggcaggagaatctcttgaacccgggaggcagcggttgcagtgagctgagattgtaccattgctttccagcctgggagacaagagcgagactttgtatcaaaaaaaaaaaaaaaaaaaaaaaaaaaagctcagcaagatgaaaatgttcagtatggttgggtgtcttggctggcagagacacaataaagaggggcagccagcagatgttaaaagcccctaaaatgatccccagggtttctatggctttccttgttggtaagtaaatttcctgttgttctaggacactatcagcatgcttgattttcatgtgtttaacaaggggaggacagccagttaagcacctttgcctctcatggaggtcggggttgagggagcagagtgagctgtgatgacctgggagtggtgctgtgatgatggcgcctggatgttcttgttgggcactgtgtgaagatgatgaacaacacagccagaatgtagaaggtcttacatgtggagtaggtgctgcaggagatctaggagaagagcactcggataagagatacaatttgagatggcccatttactgtactacagggcactggtgatggcccggtacctggtcagaacaacacagaaatataggttggaggccatgtagcacgtgatgctagaagacagccagatgttgcataggagttagccacatttccaggtgtgtgtgatggtatatgtgatgctcatggatataaacaagatgaaaacgaagagacttgcgctccagggagccagtgagatagttggctggtgtgtgtagcttcctggtgaggaggacgatgtggctggtgtgtgtagcttcctggtgaggaggacgatgtggctggtgtgtgtagcttcctggtgaggaagacggtggctggtgtgtgtagcttcctggtgaggaagacggtggctggtgtgtgtagcttcctggtgaggaagacgatgtggctggtgtgtgtagcttcctggtgaggaggacgatgtggctggtgtgtgtagcttcctggtgaggaggacgatgtggctggtgtgtgtagcttcctggtgaggaagacggtggctggtgtgtgtagcttcctggtgaggaagacgaggtggctggtcgcttcctggtgaggaagacgatgtggctggtgtgtgtagcttcctggtgaggaagacggtgtggctggtgtgtgtagcttcctggtgaggaagacggtggctggtgtgtgtagcttcctggtgaggaagacgatgtggctggtgtgtgtagcttcctggtgaggaagacgatgtggctggtgtgtgtagcttcctggtgaggaagacggtgtggctggtgtgtgtagcttcctggtgaggaggacggtgtggctggtgtgtgtagcttcctggtgaggaggacggtggctggtgtgtgtagcttcctggtgaggaggacggtggctggtgtgtgtagcttcctggtgaggaagacggtggcaagcagaaaggtgttggagagaactgttgtcagggtgatggtggaaaggaccacagcaagagatctctagccctggaagttcccagctcctaagcctctggtatttttgtagcatcaaggggtctgttggaggcctcctagaggatgtcttccattggatggttttgtgagggcattctagggagctttctcttccacagtcgtagcttctcctttgacagttgtctgtgaaaggtcatctttccatttcatactactgggaaccgtacatcagaagagcgaaccacagcagaaaatccccaaggcttgattacatgaagaacatcgaggtgaggtgactcctagctacagttaaaggcttttcccaaatcagatgaaatcccaggatgtctgtgtgttccggaactctgatggacacgtgctgagtatgttagacaattgcaggttgtcacaccactgtggtcaaagctgcacaatttcttgcctttggcattttgaccctttttaaggcttgagacttatacatgtttaactgtgtcttcagaatatttcccatcctattccaaagagattgtggatttcaggttgctgcctgggagcttttaaagttagagacaaaagggagtaccagcttcttcagagaagcagtccggtcagcagctcacagttttcctaggtgaatcctgacatacgattggtacttaattttggttccacttccactgactgtttttgagcctgaaaagacaaacattccagttaccaaagcttgaagaatgcgtgaactcggagaaggtaaaacaaacgatcactgagtttgccaagaggtgcaggtgtgtagaagcccctccctggccatgcatgtggaatgctaggcttgcccccctgggctctcctttcttcacatggtctgattttggtctacatgatcacagcccccagccttgcaccttcccctggctctttcccatcctgcacttttgggatactccatttctttttttgttaattaataattttatttgtttggagtagtttgggaagttcccttatacttcctcttccttgctcacagcttcccctattaatagcacttgtattagaatgctacatttgttaaaatcagtgagccagtgttgacacattattactgactaaagttcatggttcacattagggttcactctttgttttgtggggatctctgggttttgctaaatatctaatgacgtgtatccaccattacagtctaatacagagtagtttcactgtattctacaactcctctgcactccatctctctctcccccactccctcccaacccttagtcagtactgattgttttattatctctatagttttgctttctccagaatgtcacgtcattggaatcatatagtacgtactcttttcagactgtctcctgtcacttacaatgtgcatttaaggttccttcatttattttgtggcttgatatctcatttctttttattactgaataatattccattgtctagatataccacagtttatctaatcatctgttgaaagacatcttgatcttggttgcttccagtttttggtgattttgaataaactactctaaacatttatgggcagacttttgtgtagacatacattttcacctcatttgggtaaacacccaggcaggagtgtgatggctagatatgtggttagtctacgttcagtttgtaagaaactatattgccgtattgcccctatattgctgttgaattggagactttgaaacatattagctttacaaaagatgttatacaacttgagtatttttttttcttggccagtgtacattaatgttttggcttgctgtcaagcccttgggttattactgctgtggattattgctatagctttgctactgactgctagcatgccagcagtctttttttaatagaaaaagtaattgcaaagtatcccttgagagagaggattgtacgaccattgtaaaagtttggccgctgaaacttttttctttctgcttttttatgtgtaatctagaactattatatttgaaatataaatgcattaaactcttttatcttttaaattttgtttcaatgactttaggagtatgagtcgtttttggtcacatggatgaatagtgcagtggtgaagtttgggctttaagtgtacctgtcacctgaataatgtacattgtatccaataggtaatttttcatttctcccctgcctgcttccccctgctctgagtctccagtgtccatgttaccactctgtatgcctttgggtactcagcacttcctcccacttatgagtgagaacacgcagtactcggttttccattcctgagttacttcacttaggatgatggcctccagttccatccaggttgctgcaaaagacatgatttcattctttttttcatggccgagtagtattccatgatgtgtgtgtgtgtatgtatgtgtatgtatatgtatgtgtatatgtatatacacacacacacgtgtatttatacacacacattttctgtctcttgccatatacaaaaactaaccaacgtggattaaagacttaatctaagacctgaaaccataaaaattctggaagataacacagggaaaactcttctgaacattggcttaggtgaaggatttatgactaagatctcaaaagcacaacaaaataaaaatgaataaatgggacttaatgaacttaattaaactaaaaatcttctgtacagcaaaataaataatcaaaagagtaaatagaccacctacagaatgggagaaaatatttgcatcatattcaacaaaatactaatatccacagtctacaaggaactgaaatcagcaagaaaaaaataaataatcccataaaaagtgggcaaatagcatgaatagacatttctcaaaagaagatatacaaacacccaaaactgtttgaaaaaatgctcaacattactaatcatcagggaaatgcaaattaaaatcacagtgagataccatgctaccccatccagaagggctgttattaaaaagttaaaaaataatagctggtatcatggatgtggtgaaaagggaactcttacacactgttggtgcaaatgtaaattagcacaacctttgtggaaaactgcatggatgcttctcaaagaactaaaagtagatttatcatttcaggctgggcgtggtggctcacccctgtagtcctggcactttgggaggccgaggcagacggatcacctgtggtcaggagtttgagacaaacctggcaacatggtcaacgtggcgaaatcccgtctctagtaacaatacaaaaatttgccgggcatattggtgcatgcctgaagtctcagctacttaggaggctgaggcacgagaattgcttggacctggggggcggaggttgcagtgagcctagatcatgtcactgcactcacagggcgagacttcatctcaaaaaaaaaaaaaaaaaaagatttatcatttcatccagcagtcccactactaagtgtctacccagaggaaaagaagtcattgtgcaaaaaagacatctgtgatatggatcaacctaagtgcccatcaactaatgaatggataaaaataattaaacttttaaaaagtctaggtaagtttttgttgttgttgttgttgttgttgttgttgttttttgagacggagtctcgctctgtcccccaggctggagtgtggtggcgccatctcagctcactgcaagctccgcctcccaggttcacgccattctcctgcctcagtctcccgagtagctgggccacgccccgctaattttttgtattttttagtagagacagggtttcaccgtgttagccgggtctcgatctcctgacctcgtgatccgcccgccttggcctcccaaagtgctgagattacaggcgtgagccaccgtgcccggccgataagtatttttttaaaaggcctgagaaaggacaatgtaggattgtaaaaatgactagtattaacattatgagagtaatatgtgttccgggttgaaaaaaaagaattactaaaacatatggagtgatactaaagtttcttctgccatcctttgctcctctcagtgcaattctctagggatattaacagctctttgtgtgccatttcataaagtttctatgcatattaagcatttatgtgttatataccttttaaaaaacaactggaatcatactttttattaacttaaaaataaacattttaatatcgttttatatgcagctttatcccatcttaaaaaatatctacatggttttctgaatcatatttctatcataatttaactaaacttaacgtaagctttacagttaggtgaagataggggtttttcttattttatttatttttttgagacagagtctcgctgtgttgcccaagttggagtacagtggttcgatgttagctcactgcagcctccgcctcccgggttcaaacaattctctcctgcctcagccccctgagtagctggaattacagacgtgtgccaccacacctggctaatttttgtattattagtagagacagggttttaccatgttggccaggctggtctcgaactcctgacctcatgatctgttcaccttggcctcccaaagtgcagggattacagtcgtgagccaccacgcccggcctcttgtttattatagtagcgtaacgcataatgacatggccatctcattcatgatttaatgttatacgcatctaaaatattgatagctgtttaattgtccaccaaaagtctttcactggtttatactaagaatgtttttctgcacagtttcattaaacatttgttatcaaacctttttaaatttccactgacttggtaggcaattctgaagtgtctcttttcttgcttagtatttatttaaagttgagttctcattgcacattttttcataggtttttggtttgttttaattgggaagtatgtgttcatttctttgccatatttttctgtttgatgatatattttttcttgttgatttataggaattttttctctagggaatacattggtctagttccttttatgttttacaaatacattttcctgtttttttttttttttacttcatttatgtatttgttttggggtttatgtcaccaaatttagtagtacttttctttatgtcctctcaattttaggtcacactttgaaagtccttatacatgccaaagtcatttttatttttatatttttttgagacaggatctcgctctgtcacccgggctggagtgcagtgtcgcaatctcggctcactgcaacctctacctcccaggctcaagccaacctcgcacctcagactctcgaatagttggactacagccacacacaccaccatgcccagctaattttttagctttttatagagagagggttttgccatgttgcccaggctggccttgaactgctaggctcaagcagtctgcccttgccaaggttattaaataatttatacatgcttttctctggtacttttaaagtttctttttttacacctaaaaactggtttatacagtttatatattgctgtaatgattcagttttatgtttttacatgtggctggccagttgtcattatagtatgtgttaaataatgcaccctttctcttctgatttgaaatgccacaaataaattatcagattagatcgttttgctatattaattttatttttgcaggaatttctcactcttctcactcatttactttttcagatgaactttagtacaattttgtcaaattttcctcttccaaaaaatgaccttgtaactttttttattgaatatggtatctcagaagtcaagtgaagaaagggtttcaaagaggagaggatgatcagctttttcaaatactgctgatgagttacaaaaaatgaaaattgaccgttggctttaataaagtgaagatccaaatatctaaaaaaccatcatgcagaagacagattagacttgttcagtatgaccccacgttaattcaatcagcaggtgctctaaggagtccattctaaagagggtcaagctgtcctaaactaaaccacactacctgggaggaaatccattcattcgttataattggatgtatagcagaattaaagtgtaatccttcatttcctctaattttgctgtatgtacagtagagtggggaaagtttatagtttgtgcctggtttctcctgtgattatctattactttaaacagtattttaaaactttctgtgtcttcatttaacacgtttaaaaatgaagccacgtttactgactaccttttattaaaaatagtttatttatattaccaattcctcttcttgatttttgttgataaacttttgttgtattttgctgagttcatagtacttttcagttttatattgtgttgttttttgtaaaggaaaaacacttactgtaataatgattcatatttagcttttatttctgaatttcagtgtatttaatgctcatcactagtcgttagaaacagcttaactgttcccaggattttttttttttttttttttttttttttttttgagaaggagtttcgctcttgttgcccaggctggagtgcagtggcatgatctcggctcactgcaacctccacctccctggttcaagcaattctcctgcctcagcctcccgagtagctgggattacaggcatgcaccaccacgcccagctaatttttgtgtgtgtgtgtatttttagtagagatgggatttctccatgttggtcagactggtctcgaactcctgttctcaggtgatttgcctgcctcggcctcccaaagtgctgggattacaggcatgagccaccgtgcccagctgttcccaagttttaaaccttaatttttggttgcccaggaatttctttgaattgttttgtatgaagggttgtgggtgctatcccaattgcttgtttgttgaccatgtgtttatgttatctttttatattttaaaaattatctcagagatacaaaaatgtatagagaataatatactgagtgtaatcactcaagttaacatttcaaatattgttgaagttcattggcatatctctccttgatagtattcctttttattctgtcccagagattaatacttgattttagtatttatgcatgttcctataccttaggtcaatgagaggaagtacatatggcaaataaatatgagaaatatgtccagttatgatgaatgaattgatttcctctcaggtagcatgtatcagttttggacagttttgaccctcttttgtttaaccagaattgactccttagagcctttggcaccagggaccagttttgtggagtacaattttccacaggccagggagcaggggacggttttgggatgaaactgtcccacgtcagatcatcaggcattagaatctcataaggaacatgccacctagatccctcgaacgcgcagttcacagtaggattcacactcctgtgagaacctaatgctgccactgatctgaaggaggtggagctcaggcggtcctgctcacctgtctcaccgcttacctcctgctgtgcagcccagctcctgacaggccacagaccagcactggtgcatggcccaggggtggggacccctgccttagaggatttgctggttggggttaagttggagccatactgagtaagtcagatctttcttccgcacgatatttagatatttggagctcgctctttggcagccctcgagtcttaatatcctgcgtgaaatatttttatgcccctcattgttcttatttgcttttgttattttttctgatgactgttatttgtctaaactcatttttcttccaccttgacttgtttagttagaattttggatctaatcgcaagagagatgattaaaatgggattcatgttccgttcatggcccttagctgaaatgtgggctactcagtgaaactcagtaacgttcagtttcttcatctgtagggtgaatgtaatagctgcctaaggaggttcttgttgaatgatgtaatgtgtatgaaatcatgcaccttggaacctgtaaagtggtatatacatactcaggatgtgaggtatcaggataatttattctcattaaattttactttgctaatttaaattcagccaattattctgaatttagaatcatggagaatcttttgactcttgatttgattgtttagtttaacagttgtttagtctaacaatcaaatcttgatttgactaacaaattgtttagactaacaaattgtttagtcttgatttggttgaaggattgtcaatccttcaatttcatgccttctacccatttataaacgtactctttatactttaatataggcaataaaatattgaacaagcccccaaaagatgtaggtgatacgttgtaagaaactgctgatcagattgatatatccatcacaacaattctaaaagctttttttgttgcctgtagaatttttttttttgtaagctcactttgtttgcaggtccagacttctataaatctgtattcctatttgtctttcatgtatgttcttcaataagacccttaaaaatctaagatcaggctgggcatggtggctcacacctgtagtcccagcactttgggaggctgaggagggtggatcacctgaggtcgggagcttgaccctgtctctagtaaaaatacagaaaattagctgggcgtggtggtgcacacctgtaatcccagctactggggaggctgaggcaggagaatttcttgaacccaggaggtggggattgcagtgagctgagatcacgccactgcgctccagcctgggcgaaagaacaagactctgccttaaaaaaaaaaaaaaaatctaaaatcagcctgtacaattccttcttctttatttttatttttgtagagacagggtctcactgtgttggccaggctggtatcaaactcctggtcttaagcaatcctcctgccttggcctcccaaagtgctgagattacaggcaggagccactgtgcccagcctgaaattccttctaatgatgatgccttgatagggagtcagcatacccgaccgtttcaggtttttcaggaccaccacctacacgtatttccctagcgttctaagcaatgtatgcatgggaatagtctttgctgtttcttcttctttttccctaatgagtacatttatagttgtacagtcacaattatgttctcatgggtctcccagtctttctaaactgtcctcattccacataatattttccactgtgtgctaggcactgtgttaagtacaaagacatatagatgtggtctctgctctcaggagtccgagaattatgggaggttagaaagttatgatatgaatgatatacggtggggcaaaaaaatgaggaattttagatttagccctgtatgaaaggagtctaaggaagtcttaggagctgagtcttgaaagtttgcgaggtagatggagaagggggcatctgagcctagggagcggtgtgaataaaaacgaggatgagtgttccttttcagtgtgtcatgccctggcatttcacttctgctctttaaacatttgtcatagatgctcttaaaatttctgttagaactctgcatacaaatgccgtttctgtcttaggaactttgaagtcacctgctccctgagaaaatgatccccaattgttacagaatgagaaagatttcagtgaatgtagtcatctttatcgtcctggttatttaggaagcagttcagttcagtttttctttcctctgtcccagaagattttcaatcaaaaactgtagaaatgtatcttcggtgggatattgtggtaaaacttttaaggtagaactttaggtatccctgtagagatgccttaattctgtacaaaaagccttaattctgtactttgcttcttgattcagacacttgtcccctaaggaagaagaataaggtaacactacatttatccttttcttgttctttagtgtctacattctctaatcatttctttcatgaatattgtttatacttgtatatttaagtaatatttaaatattgtaatattgagggaggagtcttgagaagctatttatctagatatgcttaaactaaatttttgcttccgagcacaatggcagttatggtattggctgggttataagttagtcacatactgtggactgtctggctgtgtctgggccacctctgtccgcccacagtcttccttgctttctaggtagtttacatatttgtatgcactagggtaaccctgtgcttagagaatgaaacgagacaatagcagatggccaagcgtgcagtacaatgggattagtattgggctcctccttcccagggttctcccctgtggtttaaagtagttttgtgttacagtaaatttcttatctttataataaatcactgacctggaaaatgtaattgagcatttgaatctgagctgcattcaaaatccgtgttaaaattgtacagcttcttgcttgattgattataaatgataatgtagcttggagtttaatttgcttacccagatgctatcagcattcccttccatgcttctgtaacttctgtttatttcattttgcttgcatcgccagtttcctaggttttgatatttagagttttagatttagcaggagcagaaagctgatggagatataggtttggttttgttttgttttttctgtcctagttggttctgtgaatctcttctgttttgttttgggtacacgccagagagaagggttctttgtgtgttctgttcgttttctgtgaagtcttggatgagacacttgttagtttcttcactttttccgtatcataaaatcggacaggagagtaaggttgttgttttcttaattaaagacagtgtttactaatatattctgagaaaacattttatttttaaaattgtgcctttttatttttaataaagatcagttcctgtattttctaaatggtattattttaaatgttaacccagctgtggaacaagctaagtttagagaagactgtgtcaggcctaattgaattttacatctgaaacataatttagttagacattagaattttttcctttcctttacttgtaattgtctaatagaactcactttgcagttctttgttgatggagaatatgtacagttaaactcttgaaatatcattttattgcaaaaacaatgcacagtaagtgaagtttgatttgatgatggtatttttactggtagctaaggaaatatactctgtgtacatttatttgcttcatacagcttttttcccctccctttttagaagtaaacctgaaggaagtagagagtttaacttgcgaagtatgatttaacttctatatgttgacaggtttctggttttaaatgatgttgaccctatacaagtggtattttataattattgaagaattattctcttagaaagggaagttttttgtttaaccttgttacaatgtaaatcttttaattatgatgtgttccttagcagtattccttccacttccagagcactccgttccaaaaaatactacagattaacaaaatacccactcatccctacattttgataatctaggaataataaacttcagatataagtgattaaaacaacaataaaaattgatgtattgtgatagatctagcaaactctattgctgcgtaataactaccctaaaacgcagtggcataagcagccgttttattttgcttatttatttgtgaatctggaattccagaagggctcacataggtaatttgttcttgatttgtgtattttcacctggaagtgtctatgattggatgatctcctaccaagatggcttattcatttgcatatattctatctttgctccttggcctctgtctacatggtggttttcattttttttttctttattttctgagatagagtctcactctgtcacccaggctggagtgcagtggcacagtctcagctcactgcaacctccacctcctgggttcaaacaattctcatgcctcagcctccctagtagctggcattacaggcgtgcaccaccacacctcgctaatttttttatttttagtagagacggggttttgccatgttggccaggctagtctcaaactcctggcctcaagtgatccgcccgtcatggcctcttgaagtgctgggattacgcgcctgaggcaccacgtctggcctacatagtgtcttttgcctcagcttctgcaggtgccttgggttcctcgtggcatggggagaatagtcacacttctaatgtggaagctggcttccagatttgtagatgttagaagcagaagctgcttggtcagttaagggttattcttgaaagtggcttggaagtagcaggtcacttctattgtattctgtcggtcatagtagtcacagaacctgcccccctgccttttttttttttttttttgaggcagagtctcgctctgtcgcccaggctggagtgcagtggcgcgatctcagctcacatcttggctcactgcaacctccacctcctgggttcaagcgattctcatgcctcagcctccctagtagctggggttacaggtgcctgatgctgcaccggctaatttttgtatttttagtagagacagggtttcgccatgttggccaggctagtctcaaactcctgacctcaagtgatccacccgactcggcctcccaaagtgctgggattacaggtgtgagacaccacgcccagtctgctttctttttctttttttttctttttttgagacggagtctcgctctgccgcccaggctggagtgcagtggccggatctcagctcactgcaagctccgcctcccaggttcacgccattctcctgcctcagcctcccgagtagctgggagtataggtgcccgccaccacgcccagctgattttttgtatttttagtagagacgagattttaccatgttagcctgatagtctccatctcctgacctcatgatctgcctgcctcggcctcccaaagtgctgggattacaggcgtgagccaccacgcccggccagaacctgcccnnnnnnnnnnnnnnnnnnnnnnnnnnnnnnnnnnnnnnnnnnnnnnnnnnnnnnnnnnnnnnnnnnnnnnnnnnnnnnnnnnnnnnnnnnnnnnnnnnnnnnnnnnnnnnnnnnnnnnnnnnnnnnnnnnnnnnnnnnnnnnnnnnnnnnnnnnnnnnnnnnnnnnnnnnnnnnnnnnnnnnnnnnnnnnnnnnnnnnnnnnnnnnnnnnnnnnnnnnnnnnnnnnnnnnnnnnnnnnnnnnnnnnnnnnnnnnnnnnnnnnnnnnnnnnnnnnnnnnnnnnnnnnnnnnnnnnnnnnnnnnnnnnnnnnnnnnnnnnnnnnnnnnnnnnnnnnnnnnnnnnnnnnnnnnnnnnnnnnnnnnnnnnnnnnnnnnnnnnnnnnnnnnnnnnnnnnnnnnnnnnnnnnnnnnnnnnnnnnnnnnnnnnnnnnnnnnnnnnnnnnnnnnnnnnnnnnnnnnnnnnnnnnnnnnnnnnnnnnnnnnnnnnnnnnnnnnnnnnnnnnnnnnnnnnnnnnnnnnnnnnnnnnnnnnnnnnnnnnnnnnnnnnnnnnnnnnnnnnnnnnnnnnnnnnnnnnnnnnnnnnnnnnnnnnnnnnnnnnnnnnnnnnnnnnnnnnnnnnnnnnnnnnnnnnnnnnnnnnnnnnnnnnnnnnnnnnnnnnnnnnnnnnnnnnnnnnnnnnnnnnnnnnnnnnnnnnnnnnnnnnnnnnnnnnnnnnnnnnnnnnnnnnnnnnnnnnnnnnnnnnnnnnnnnnnnnnnnnnnnnnnnnnnnnnnnnnnnnnnnnnnnnnnnnnnnnnnnnnnnnnnnnnnnnnnnnnnnnngagacggagtctcgctctgccgcccaggctggagtgcagtggccggatctcagctcactgcaagctccgcctcccgggttcacgccattctcctgcctcagcctcccgagtagctgggaccacaggcgccgccacctcgcccggctagttttttgtatttttagtagagacggggtttcaccgtgttagccaggatggtctcgatctcctgacctcgtgatccgcccgtctcggcctcccaaagtgctgggattacaggcgtgagccaccgcgcccggccgaacctgccctttttaaagcaaggtggtggtggtgtcaagaatgggactccacctttttcctgagaagagaaggggtcgagttcatggcagaagagtatgtgagatgggagatattgttgtgaccatttttggaaaatacctacttcaatagaataaaacattggataagagactggaaatcaaagagtgagtttttttgtgcggtatgacaataaaattcttattcccttttctgtcttatgatgttgcagccttattaaccagaatggaagtggaatgtttctgtttccatgttttgctcagtgttataatctgttatttttagggtttctactgttaacctgttgctttcaaacaagctactccaaaccagaaagaattctaaacaacttaagagttgttttacctattaccacagggtataaatgtaattcgtagtaagaaagtacagcagaataagatatgtggaaaggaagaggactaacagaaggtgaattaatgctacttattgattttggagattcaccttgggtgagaagcacaactgtctagaaggaaactcttgtgtattagtattctaacaagaaccagtctgcttgctacaagactgccttttagaagatagaggtgtgtattgatgatacacagaatgcaggagaattttaattttttttttttttgagatggagtctcactctgccacccaggctggagcgcagtggcgcaatctcagctcactgcaagctccgcgtcctgggttcacgccgttctcctgcctcagcctcccaagtagctggaactacaggcgcctgccaccacacctggctaattttttgtatttttaatagagatggggtttcaccgtgttagccaggatggtctcgaactcctgacctcgtgatccgcccacctcggcctcctaaagtgctgaaattacaggtgtgagtcactgcgcctggcgacaatttttaagaacattaagaagagataaacttggctaaactgttttgtgttatttgagggggataaagcaagatacatctcagaactttcacacttcatcagtgagtattttcacacttcatcagtattttcacacttcctcgatggatattgctttgaaccagcactgaggggttaatttggatggaatttttttccgtttgagatataattcacagatcataaaatttaccgttttaaactggatgattcagtgatttttagaatatttacagtgctgtgcaaccgtcaccactgtccaatatcagaacattttcctcacatcagaaagaaactcacacctgctggcaattacatcccctcatcctctgacaaccgctaacctcctttttgtctctatggattcgcctatactggatgagatctttgactgtggactttggagctaatgctgaaatgagttgaggctttacaggactgttgggaaggcatgattggttctgaaatgtgaggacatgagatttgggaggggctgggttggaacgataaggtttggctgtgtccccacccatatctcatcttgattgtaataaccacaattcccctgtattgtgggagggacccagtgggaggcaattgaatcatggggtgggtctttcttgtgctgttcttgcaatagtgaataagtctcgtgagatctgatggttttataaagaggagttcccctgcacaagctctctctctgtttgcctggtgccatccaagcaagtcacatggtggcttgccttcctccacgattgtgaggcctccccagccgtgtgcaactgcaagtccattaaacctcttcttcttcccagtctcaggtatgtctttatcagcagcatgaaaatggacgaatgtggaaggctttcagtcttcaccatgaagtatgatgttgactgtgggtttttcctagatgctgtttatcaggttgagaattcactcccattcctaggttgttgcatgtttttatacaaagatgttgaattttataaaattctttttctgtatctattgagatgatcatgtggtttttctccggtcgtctgttttaacgtggtacattatattgattgacttatgtattttgaaaccaaccttgcattcctgggtaaagatagatgtgtttttaaatagctttgttttttttcagttgaataaatgtggaaacttgttctaccagcattattatggagacaataaaagtggacctgagagaatatagcctttggataaatgcttaattttcaagtactaaggtgtaatataaatgggcgtatgcaaaggcttatattgtaatatttttacatcatggaaataattttggctcttattaaacattatttctttgggcttttaagtaactgagtgaataatttgaggatttgggcttatctgtgttgtttttcatcgttgttagtacaccacattaatgttctcagagtcttgcaagttctagttgagtgttttgactgagcacacgttttaaacttgaaaaatgataattaacacgtcagtaaggaagggtccgatccctcttctgacgaagattgttcttagttgtttctcaggagatcctgtagcaggaacttgtcagagtaataaatatacagacacatatctagagaaagacaaaggatttagggaaaagtgcctggtcacagttttaaagcagagtcagtatttttattctgcttaaaaactgcttataacttgacatgaattctcttacattgcattcttatctatggtgatggttgtttgattagatgcccaggtatctgtcaactctagttgagaaattgaagtaactaaccacgtgaagaagttattaaatcagactctgatggatctgccttttatgctcttcctttttcctgctacaccagtatgtatatcctaaccagaaaatagcttcaagaatcagacatgtattttgttctttatctgtttaatcttcctataattaccagactttctcacttttttctcctaacaatttttttttcctaaaggagtttttcagattagaaaaatcatgtaattttacagagaaaaattggcaaaattctgtaagatctttggacctttttttttttttttttttgagacagagtctcactcttttacccaggctggagtgcagtggtgtgatctcagctcactgcagcctccgcctcctgggttcaagcgattctcctgcctcagcctccttagtacctgggactacaggcgacaggcacgcgccaccacaccctgctaagttttgtatttttagtagagacggggtttcaccatgttggccaggatgttctcgatctcctgaccttgtgatccacccaccttggccacccaaagtgctgggattgcaggcatgagtcaccatgccctgtcaatctttcggcttcttatatacattgcatataggtaaggaactgacatttggatttgttctccttgcatcccattcaggttgaactctgcctttatacacagcaaattcagtatttttattttttttgagacagggtctcattctgtcgcccaggctggagtgtagtggtgcgatcatggttcactgcagcctcaacttcctgggctcaggtgatcctcctacctcagtgctgcaagtaactaagactgcagttgtacaccaccatgcctggctgattgttaatattttttgtagtagagatgggtttcgccatgttgcttaggctggtctcaaactcctgggatcaaatgatctacctgcctcagcctcctgaagtgctgggattacaggtgtgagccactgcactggccaaatttggcactttcataaagcaactaaggaaacaactttaaatgaagtaactggttttttgtttgtttgtttgtttttttggaggaggagtctctctctgttgcccaggctggagtgcagtggcgcaatcctagctcactgcaaccttcacctcccaggttcaagtgattctcctgccacagcctcccgagtagctgggattacaggtgcacaccaccactcctggctaatttttttgtatttttaatagagatggggttttaccatgttggccaagctggtttcgaactcctgacctcagatgatctgccctcctcggcctcccaaagtgctggaattacaggcgtgagccgtcacagccggccgtgactcatcattttaaacattctggattcttgaaaagaatgccaccgattaatgatttgtaacttctcttttgacagtctgataaaagctatgggctttctccaggtaaaagtgtgcatagttcgtttgtgtgaactgggatataatatacaccttaaggtttatccgtgaacttctgatgaaaaacacccacctttcatcatgacgtggtgaagaaaaaaataaataaatcaaagcacccaccatctgtggaacaaccaagttggtgatatacactggtttctaggtttcacaaaatcataaaatatgtatatgggtcaaatacaacagaaattcagggcaactataatttcatgttaattataatttcactagaaagagtgatcgatgcaacctggttctctcctgagtgttggaggacttactcctccggatcactggaagtgttatcgacaggaagccctcaactttccctagagattgtcttggctaaagacaccaccttgcccgagggcatgcccctcccatggacatgcagtgattgatccttgtgagggaccatggcttgaactccttccccctacttgggacgacagcttgagaactcctcatggggttgtcagaatcctttgggacttcatggcaactgaattgctccctctgtacaatcctgatttttctcttcgtttctactgacactcatcccaaagacaaactctaataaacttcttgcatagtaatgtctatctcagggtctacttcctgggaaacccagtcttgggtagaatatggggaaggatattagtacaagttagcatctttcaacccataaaagtagacctggcgaaaataaaaattcagtgagatgaacttgaatttaaattaaaagtatgtgaaacatctcgtcatatttctttcagaccttatattcaggtagtttttgaaagtcttgatttctttgaatttatttgtgtctctcagtctttctttggcattgaagaaaactccccaaatctctgaaagcttgatctgtttggttacacattatgaccttgtgaaaggtatgggttaaataatacagttgcttacatgccccaaagaaacccctagagattttccatgttgacaagtgaatatgataagagaatctccttttgctaagatttcttggattgtatttagaaaatatttggttttgtcattatcattaaaattatgtttgtctattctaaatatatgaaaagtatggaaaagctataaaaaagaaaaatctatgtaaaaataaacttctcctcacttgaaattggtataatattactcatactttttggtgacctgtcttattcatgtaatagtgtataataaacaagtttttgtatccttaattctcaagaataggagctgtaatggtataatattctttccacccagtagatagaccatattgaatttggccagccttttattgttatgtgtttaattattcccaatttttaaattattacaatacaatggatttttttaaaaattaagcctcttgtgcctgctttagttttttaaaagatactggatctctcatcactaaaatgtagtgaactgagactaggctacctggatagccactgtaacggaacaacttcaggggaagccgttcacatagatgatacgaattgagggccgtggtgaaatctcatcattgctaatgccacggaaggattgccattgtggatttatgtgccctctttgtctttcgagcaattatagcacagggaggtctgtcaattttatatacatgccgactagatataaaaaggagggtttgtgctgctttccatgattgtctaccaggcagattgactggcagtgacctttggtcttaccagcttttgtgtcattttatccagtggttctaatgcaagaggcccatagttccatgatctgtaccacgaacaaatctgccaaggaactttctttcctaccagcaattaacaaaatctgcctggagcagtggactctgaaaagatattttcttaagggctatgccattcgtgtataattaaatttgaacagttttaaagataaaatatagtagtattctggtgaagtttattactttttaaatgttctcttcttccttataagaacattgttatattttataatcgaaaggcatattaatagtcttgttttacagttaaagtgatgagaaagattaagcaaattgctcaatgccacgtaactagtcactcattacagtaattcactctgtagtctgtactatgagagaacagcacaactgagagggaaacccaaccaaggaagtattagttgctgcctgacgacatctttgctgggcttattgaggaccataagcagtaattgagaatactgatatgaaaacttttaaaaacccaaattgaatttaaaacatttcttagagtttcttatggttttgtcagtcttgcagcttctcatcactggaaacaagtggagaagcaaaaatttagatgtcaacataatagtctgggcaagacattctttttttttttttggtaaattatagttttgccttgtttgtatattttgtttgagtgtctgatggtagacaaactgttgactagaaatcaggggacttagaacctgaaaaggaaaaattcactattaattactatagatccctctttgccaactgattctgaccagttcatccagactgtatttctgccatcaataccgaaaggcattattaaccaagaaagtaaagatcagagccttttcgaataactgacttcatacagtaaatttgatgctgatggctacttcaaagaactgtggaggcaccctcaaaagtgttcctttaaatgatatttaaagtgaaccaggggattgcaaaaagtgtgtttgagctgtctggtcctcagaactgtgtcctagaggaagtgtcttctgcgtttgcccagtgacttgggcctcaaaggcagagtaatcagttccacttggctgggaataaatcacccacactgaaacatgatagctcctgacaactgggcagtgctgataaaagccaaaacaaaagatgtcaataaatctgtgccagtgtggaattagtatgcagatttgatgaattcactatgtagcattgcagtcagcattagacttcctctgatttcatcagtgtttctttcttgttaaaataaaaattgtatgaggacaagaaagccggtatataaagtaactattttatttctgtttctttccaccctagtaaacaaaactgtaccatgattacagaggtcattttaaggaataatgtcgtctttctccaaacagttaatttaaaaatatttcttccttgggctgggtacagtgactcacatctgtaatcccagtgctttgagaggccacggtgggaggatcacttgatgccaggagtttgagaacagcctgggcaatgttgccatacttcgtctctacgaagattaacaattggctgggtgtggtggcatgcatgtgtagtctcccctactctggaggctgagactggaggattactcgagctcaggagttcaaggatgcagtgagcaacgattacactgtcacacttcagccttggtgacagagcaagaccctgtctcaaaaacagaatgaacaaataggtatttcttgagtttactgtctcaaaaacagaacaaacaaataggtatttcttgagtttactacacagtgataattatctatgatggtaaactgtatatataaacctgtttgatatcaccccgcttctgttatcattgagggcacaggtgtgtggaataaatgccagttcctttgatcgctacgaaattttgcttgtagagaaattgaatacatgctaatggtagtgatttctttctatgtcagggagagtttatacaaaaaaaacccccatgggattataaaatgtatccttttctgttacaattgttttattaattttcaattttaaaactaatttatgtaacagaagaaaaaccttttaaatgttttattagcaagttctccttggtctatctgtctgtaaataaactagcttcctttagccttgaaagttaggctaaacagattattttaataacatcgtggtcctgaaatccttacgtcaagtatctttggctctgcccaccagctttagtgtatggtgattagatgtatgtttcatccatgaagaatgtacttttccatttgcagtggtttggtacctcattctttgggggttcttttattctttgcttcagtagtgggtacattttaaatacatgatcgtagtaatgatatactatatgaatgaacactataatcataagatcatttatggaaagatgctttatgtgattactttttcagtttttcaccatagaatgtattatttatagggtggtaattaagagtagattctggagctagattgcctagtgattttctcgtagtcctgtagtgatgcttcaatcattattacatataaagtccttacaccggtacctggcacgtttttaggtgttggctgctcctgtgatctgcctccacaccgccactgttatcattgttgttcttgttactgttttctagggattctgtggtttatagtcctaaacaatggagactttttaaaaactagatataccgagcatattaaaagggtatttttccgctacacatgattccgaacaatcattttgatctttatcttctagcatgtgcataatggatccagtttttctcttggctgttcagagcttcttataaatcttgtatttcagatcctgtggattattgaacttagtgtagaataggctctctgctgaatattttataaaatggcataatacatactgaaataatgtggtatgggactgtcagaggaaacaacatttacaacctcagctttagcttggtgaaaaagaagagaatagtgacaagaataatgtggtaacattcatacttcagctggttagtgactcatatcaactgaggtccttgatcacaaggaaagtgaggatatgtcacaggagccttcagtggggctcaaatgttatccatcatgatgctggatcaatggaaagagaagtatttttatagacacacccacctcccacccctcgcatgttttgggtttgttccgtgcttgcgcagctggtttgcacccatctgggtctatttcaggtcttcctcactgatggcaacttgcccagaggaggtaatcttagtgtccacccttctttttttattttgtgagatcctttcactatgaatgtttgtttctcttcttttagaagtaaataagcgtctaagaatagccatcccttttcacctctccgactcaacagtctgtctgtctagaatgggtaattgaaaaagaaagtagcttgtcgagaatttgctgatgggattttacctggttcagcagcttctgcacttgagtatatcagcagaaatgtttactagcaaagaataatggattcctttaatagtttaattacatataaggtataaaagtgaaattgttaacattttaattccttaatttctccctagatgcagacgatggagtagaaagaagggtattatccttattatgtatgtaaggggtgtttgtatattaggtaggctcataaaaccaatctgtcgtcttgtaaaacttggttggttctgtgaaatttcattttaaataatgtttcttgtattgccctttcttgacaagaaagtctagtcagcagcatggccatagcttttctttgtgtaaggcctgtatgttagcaactggaatgacctgcacagctggttgaacatgtaaacaccaaggcattgtgttctgtgtgtacacgtatacctcagagacattgcagattcagtccctaccacaataaaatgagtcagacacattttttggcttcccagagcatgtaaaagttacgtttatactatattgtagtttattaagtatgcaatagcgttatatctaaaaatgtgcataacttaaaaatactgtattgcaaaatacgctaatgattttctgagccttcagcacgtcataatattgttgctggtggagggtcttgcctctgtgttggtggctgctgactgatcagggtggtggttgctgaaggttggggcggctgtggcaatttcttaaagacatcaatgaagtttgctgcgtcgatggactcgtcctttcaagaaagatttctctgaatcatgcagtgctatttgatagcattttacccacagtagaatttctttcaaaattagagtcagtcctctcaacccttggcactgctttatcaacggagtttagtaatattctgcatattttgttgtgatttcagcaatgttcacagtatcttcaccaagagtagattctgtctcaaaaaaaaaaaaaaaaaaacaaaaaaaaaaaaaacaactctttttactcattcagaagcagcagctccacagctgtcagttttttttgtttttttttttttttggagacagagttttgctattgttacccaggctggagtgcaatggcgtgatcttggttcgctgcaacctctgcctcctgggttcaagtgattcttctgcctgagcctcccaggtagctggggttacaggcgcccacccccacgcctggctaactttttgcatttttagtagagatggggtttctccatgttggcctggctggtcttgaactcctgacctcgagtgatctgcctgcctcggcctcccaaagtgctgggattacaggtgtgagccaccgtgcctggcccatctgttcaaattttatcatgagggtgcagcagttcagtcacagcttcaggctccacttctaattctggttctcttgctatttccacatgtttagtgacgacttctactgaagtcttgagtctgtcagagttaaccaggaggattggaatcaacttcttctgatctcctgttaacgttgatattttgacctcctcttatggatcacaaatgttcttaatgacatcaggaatggtgaatcctttccaaaacgttttcagtttacttcgcccagatccatcagaggaatcaccaactatggccttacaaaatacgtttcttaaatagtaagactaggaatcagaatggctccttgatccaggagttgcagaatggatgttgtatgagcaggcgtaagaaaagcatgaatctccgtgtatctctctgtcagagctcttgggtgaccagatgcgttgttgatgagcagtaatattttgaaaggcatctttttttctgagcagtaggtctccacagtgggtttaatacaccaagtacaccatgatgtaaacagatgggctgtgatccaggcttcattgttccatttataaagcataggcagagtaattctttaattactaatttaaagaattctttaatcagaatgataaatgaacattggcctcaactttcagtcaccagctgcattatcccctaacaagagagtcatcctcttctttgaagctttgttttctttgtgttttttttgtttttgtttttgtttttgttttcctttttgagacagagtcttgcttcgttgcccaggctggagtgcagtggcatgaacttggctcactgcaacctctgccttttgggttcaagcagttctctcgtctcagcctcctgagtagctgggattacaggcatgggccaccatacccggctaatgtttgaaggtttaaagccagacgttgacttatcctctctagctataaaagttctagatggcatcttttgccgaaggctgtttcatctattaggttggtgcaaaagtaatttctatggcaaaacctgcaattacttttgcaccaaccaaatgcattcaaagtccattgtttgctgaggccaccttcactgattatcctagctagacctggataaggtgctgcagcttctccatcagcacttgctgctttactttgcacttttagattatggagacggcttctttccttaaacctcatgaaccaacctctgctagcttgaaactttgctcctttagcttcttcacctctcaatctccattgaaatgaagaagttagggccttgctctggattaggcgttggcttgaggaatgctgtggctggtttgatcctgtatccaaaccagtaaacttttcccatatcagcaataaggttgatttgttttttgtgtgttcactggagtggcagttttgatttccttcagtgacttgactgtgtggttccagaggcctagctttcagcctgccttggcttttgacatgccatcctcactaagcttaatcttttttacttttcaaactctgcttgcagcatttgacttaatcatttccaaatttggactagaagtgagagatatgcgacttttccttccacttgactatttagagggcattgttgggttatgaattggcctaatttcaatgtagttgtgttttaaggaataggaaggctgacacagggagagaggagagggaatgattgatcagtggaacaggcagaacacatgcaacgtttcttaagttcaccatctcatacaggtagagtttatggcaccccaaataaattacaatagtatcacaaagatcactgatcacagatcaccataacagatacactaataatgagaaatattgcaggaattaccaaaatgtgacagagataccaagttagaatgctgttgaaaagtagcgctgatagacttgcttaacgcagggttgccacgaaccttcagttagtaaaaaaccagtacctgtgaagagcaataaagcaaagtataagaaatgaaggtatatgcgtatatagagtactgaatttttgagtggcgaaattctctttaatggttatgagtttccctaaatgttgacccagatgcgatttcaatagtagtgtctgactattactgctttccatctgggatgaactcaattcttacagtaggctttggtctcttactgggcaattcagtggttcacccatatgattatctctttgttaacaagtgaaaatgtaagcttcaacatatccgtgtaccctattctaaacttaccaaatctctttcttagcttttttgttctgcctgtcaagtccttcttgactctagagaggtaccttaaagagcttgtactaaatttattaatgtaagaaactacctgacaattggatccaggattgttttgtaattccgttcttggcaagagtttttgtgaatccctaaatgcagtttatgaaagtccaaacttatatattcatttattgattaatgtttgctacgatctgagatgtaccatataggaaggtacaaaacagatggaggggcaggatccatgtctacttgtggagacatgtataaaacaaagaattacatatggctacatacattaatcagtgctataatgattgatagatggaggaatggagatgtgtgatcaatatatagatacctggaagaatggaggagtgtgtatttatacataatgtatacatgtatatgtatcattaatggggtacagacaatgatcaagtttttctcgtgggggtgaggataacagactattcctagaggagataatgtttatcttgcattttgaaaaccatgtagaaaaatcaggtagttctagtatcagctcaagaggagacggtggttatgttctcctgcttcatttttctccatagaacttatctctgccctacgctatattgattcattcatttcttcagtcactccctccctcctcccgtcattcatttatctaccttactagaatgtaagctccatgaaggcaggaatttggtctgttttcattgctctgtttcctcagcaactggaaaagtgcctgatctatggcaggaatttgaactcgtgtgtatatagtgaatgaatgaactttgtgagtagttggtttatttataattttcctttagcttattaaggatagctcctcagaatttccttatagttttgatttttttattatacttgaataatacttttttattgtacttgagtctccttgtacttgagtgataacatgctgcttgttgtgcttgagtgataacgcgctatttccacaatgttatctcacagtatgtttagtccccataatcttgcctgaactgatacaaactctaatggttttcgatgtctatatgcgaagtcctcttaaatttttgttgaaagaatgggtcgggtccttgcatgctgacactgccaacactggcactgttacttatttaaagtacagaattggccaggccatttctgtgcttaaaaatctctaatggttcccctctctggaataaagtctgtgctgcttaggttggtacataagcgtctttgctccttaggttggtacacaagctcttctgtagcttggcttcagctgtgtgatgatgcattttcttaccatctcatagtggaataaaaacgagcctattcatttttcttcatatccgttgtgtccggcatgtaataaagaattcaacaaatggtttttgagtaaatgagcacatataagtgtatatgaatgaatggccacaaaaatgtttgctgcttagataaaagatgatataagtaaatgaatgcatgtatgtatgaacgaatggctgtgaaaatgtttgctgcttagataaaagatgatttaaaactgacataacactagcctttaagaacagccttttctttatatagctgatttgtctttctcgctgtttagctgctctattctctgtcctccctttattctttgtcaaggaatccctcttggcatttacaatgtcatattagaagtaattctagtcctcatggctttcctctctacgtggccatctctatactggatcttttctgctagctacttttcttattttgttagggatttgtgtgtatgtgtgtgagtgcgtgtgtgtgtgtgtgtgtgtccatacacgtgtgtaccttttttttgttttgcctgcaaattcctacaaattcaatttgcctgcaaatttaaggttttgcatgtaattctgaaactcttaggattaaatgatttctacagaacgcgcacacacagacaaccctgaactgttttcaaattgaaatgattttgattgtgccgctgtgtttttataaatgtcctctcttttcccttaaatatttatgtgcatttagattgaaaatcttcaagagcagcttagagataaggaaaagcagatgagcagcttgaaagagcgggtcaaatccttgcaggccgacaccaccaacactgacactgccttgacaactttggaggaggcccttgcagagaaagtgagtgactgtccccaactccacacgcgttttctgcgttctcattaatctaagactgggtgtagaatacaaaagaaatccctgtgggcaaaagggaaaagaactgctgtgtgctcttgctgacatatgtagtgtgaaggggaaattttttttttttaagagtcccagtctgtgcgcaggctggagggcagtggtgtgatcttgtctcactgcaagttccaccccccagtttcaagcgattgtcctgcctcagccttccaggtagctgggattacaagcatgagccactatggccaactaatcttctgtgttttctgtagagacggggttttgccatgttggccagaccggttttgaactcctgacctcaagtaatccacccacctcggcctcccaaagtgttgggattacaggcatgagtccctgcacctggccaaattgctctgattttcaaacttcttgagtatctgttgacagaaagttctgatgatttctcttttctttaccttcctttatattttaaactcaatatatcaacatctttcccattccccctttttggtgtgtgagttgtgagttgtttccattgccttgtaggcgacatgtgagtaatatatcgagaagaaatgtttgatagttattgcccttagggtgtatatgtaagcttttagttacctggaaattgaataaacggaaatattccaaaagaatactttagtggtatcaaataccagttgagattataagaaaagaaaccttgggattgaaatgaataaagctatgtccttgttatggcaagatgaataagaaggatgaattatttagaaagtgtgttctggctgggcactatggctcatgtctgtaattgcagcactttgggaagccaaggcgggcggatcacctgaggtcacaagttcgagaccagcctggccaacatggagaaaccccatctctactaaaaatacaaaattagccaggtgtggtggcacgctacttgggaggctgaagcaggagaatcacttgaacccaggaggcggaggttgcggtgagccaagatcatgccattgcactccagcctgggcaacaagagcaaaactcttatctcaaaaaaaaaagtggattcttaaaaaacttaccattgtcttttgaacatagaagtttgaaattttatcagctaatagcagaattacagtcatataagtgcaaaagggaatttcctcacatcttgatttattctctcatcaggagcggacaattgaacgcttaaaggagcagagggacagagatgagcgagagaagcaagaggaaattgataactacaaaaaagatcttaaagacttgaaggaaaaagtcagcctattgcaaggcgacctttcagagaaagaggttaagctcaccgaaatggaattagtttgtttgctcaatcattgcacgtgtctgtatgctgttggtgttttcataatgcatgtacaaaagtattcgatggaaaattcttaatattcttttagcaggctttttgtgaataccttaaggaatatttcagaaagctttgcagagacgtagtggattggttcattcattttctaagtgttactatgttttatgttggttttttacttactaatatttttatagacctaaagtaactgaagctcagatacatttggagaactagtgtgctaaagataagaaagttgacagataaaaggaatatgcaaaagaaggaaattttatgtataccaactatcaaagaacacaacagctattaaattgggtgacttaatctacttgaatcttgcttttggagaatcctgttagtatgacctgaagagcaaagatgcctcatgctgtgtaatcagatggtgataatgcatgaactgtagcatctttctgtggattttctttctgatatctttaggaaatgttatggaagtttaaattcctaatagaatttttcttttaatagggaaaaatgtgatttatttatttttttcttttaagagatagcgtctcactctgttgcccaggctggagtgcaatggcgttatcatagctcactgcagtcttgaactcctgagcccaagggatcttcttatgtcagtcttccaagtagctgggactatacgtgtgcactaccatgcccagctaaggtaaaaaaatttttttttgtgaagacagggtcttgctatgttgcccaggctggtcttgaactcctggcctcaagtgatccccctgcctcagcctcccaaaatgctgggattacaagtatctggccgaaaaatgtattttgtttaagttaatgtagctactgaggtttgactacttacattcacaaagcttgatctactttggtttattttgtagaatgggtatgtattgacagaactctttaaatcactgttcaattggtatttcttgagaatccatcttatttgttaagagttgaaagctagagttaatattgttttatatttcatgatgaatttccttgaaatggaaatatgtcagcatttggtaatggaaaggaaattacagctaccacgataaatttaaaattttaaatctctattttgtttatagttatttattctagatgtgtgttgcttcttttaggcttcacttctggatctgaaagagcatgcttcttctctggcgtcctcaggactgaaaaaggactcacggcttaagacactagagatcgctttggagcagaagaaggaggagtgtctgaaaatggaatcacaattgaaaaaggttaaagaaaatttttcacattttttttttgctttgctttaaataagagcatagccttggcatgtttatatgaaataatttaccaatggagtaataatcccccaaactttaaaataccatgtatacctgaattaattatcttagcattcttatcctactttattttattcaagataatcccccaagtctttgaaaattgacagttcagagaaaaattaaaatatgcagctccctcgtgggtgaaatatgagacaacagtgtaaaaatctcagttacctgacatttttcttccattagaatcagacttctgccgggtgcggtaactcgtgcctgtaattccagctacttgggaggttgaggtgggaggattacttgatgtcaggagttggacaccagcctgtgccacagagtgagaccccatctcgtaaaaaaagagaaaacggtggctcacgcctgtaatcctgcactgtgggaggccgaggcgggcggatcatgaggtcaggagttcgagaccagcctgaccaacatggcgaaaccccgtctctactaaaaacacacaaaagattagccaggcgtggtggtgcgggcctgtaatcccggctattcaggaggctgaggcaggagaatcgcttgaacccaggaggcagaggttgcattgagccgagatcccgccgctgcactccagcctgggcgacagagcaaaactccatctcacatacacaaaaaagaagaataagtgagagcgtattctctaatttaacctgtgtagtaagatctgagactcagaacaattgttaaatatcctgtttcagattttatctcattttggagaatgttaatttcctagcatttttttaaaaaagacagggcacatgttgtcagaaagtttacttttaatttttcatagcagcttatgaggcctagaatttcgttatcttcaccttctacattaggctttgttttttggtttacagcttatgtgtagatttacataaaggactatttggcatattttcttcttggaaactattactagtgtattattagcgttctagtttacatttattcaaaagcctgtgcctatcattgacatttttaaagtagatttcttctctgttttgtttggagtgggaaatgactggtcttgaggtaatgataattgaagtcatttttgacctatttatagcttaagaatttatatcctgtatctgaatattggcattccatgtcttcagtatgagataatgtcctcagaatttattaaggaaaggattgaaactcaacttttgagataccagattttttttggtctttttttctttgtttttaggagacagggtcttgctctgtcgtccaggctggagtgcagtagcataatcatagttttctgtgacttcaaacttctgggtttaagtgatcttctgcctcatcttcctgaagagctgggacaaaagacccatgccacaacacctggctaagttaattttgagacggagtctcactctgtcacccaggttggagtgcagtggcgccatctcgtctcactgcaacctctgcctcctggactcaggtgattctcctgcctcagcctccatagtagctgggtttataggcgtgtgccaccgtgcctggctaatttttgtatttttagtagagacggggtttcaccttgttgaccaggccggtcttgaattcctgacctcatgatccacccgccttggcctcccaaagtgctgtgattacaggcgtgagccaccacacccggccttttgtttttttaaaatggagaggtcttgccatgttgcctaggctggtctcaaacccctgcctcaagagatccttctgccatggcctcccaaactgctgggagcaagaccactatgctcagccttgagttatcagaatttttaaaatgcttaattctttttttttccttgtagagtgaaatacttatttctatactctgatttttgttgttgaagctttttaaaatgtttttaaccattaattttctttcccttgattatcctactcttaaaaccattttctctacttttctgtcttcttttctccctgatgctgcttactgtcttcagcatcctgtaatagtgtggagcctctcatccaagccagcagtggcctcgccaggtgttgccataaagtctcagttgatagtttttttctggcttttgtgtgaatgatatttttatcaccctatagataaatgaatatgcttaaccttctcatctctcccttcccgaaacaggaactctaggtttgttttttttttttttaaatgattcctctctgaagtatattgaggtgactacaaaatagaaaaagttcctcatactttggaaagtgtttgcgtttctgctgcttttgctttgttctgttcctagtgagttaattaattcaggactgcttctcgttgcttttatttccaccatgttgtggcttttagacacaccagtttagggtacagttttgctaacacattaaatcatgtatctgccaatagagtcttttataaaggccatgcttagtaactgaattttgacaactgatgaaacctgaaacaaaagaaattggtagaggacttaatcttgaaagtacctctgttgcttccacaaagcatttaacaaaatttacatgaacatttctcttttactcaaggtactttgaatcagagctttcctaagtatgtatgtttacccctttaataatttttgaaaccattttaagggactgaatatgttttgttgtttattgaataaggaaaaaacttgtcatagtgtttactttctcattaaatagcttatgtggtgaaaatgttgatttctacgggaatatgattatctgcatggttttgcaatcttgcatgttttactataacatgtatgaaatatgaaagaacaaaatctgcctccagtgtatgagtatgagtactgaggttttaataatgttaaaggtaggtatttttcagtagaacaaggcctgtggatggagagcttaacctttaactcagtattttaaggaggattattcactgttacatcagcttctcttgtccaaaggtgacattttatacaaatattgttatttcactaaagtttgtagcttttgcttctgaatcttcttgaccttttcacattctaaaagcaaggtgtatagatgatctgcatttttaaagcataggttaacgtatagttagaacttaatgggtaagaaaggggagaagaaaatgaggccatgaaattaaacaccttcatccagaaaatacctttcatgttgataccatgataagtgactctatggacagaagaaatacttgcatcttgaattcaatgtcatattccacaatttagaaaaccattttatttttatttatttttgtgacagagtctcactcttgcccaggctagagtgcagtggcacaatctcgactcactgcagccttcacctcccgggttcaagcaattctcgtgccacagcctcccaggtagctgggattacaggtgtgtaccaccacgcctggctaatttttgtattttttagtggagacggggttttgccatgttggccagactggtctcaaactcctggcctcaggtgatccacccaccttggcctcccaaagtgatggggtgacaggcgtgagccactgcacctggcttagaagtccattttaaagggatgcttataacactgatttgaaaaataatgccttttttggagtttgtattgtaatttatgaagttgtaaagatcattaaggtggtttaaaattcttagaattttattttaaagtacaaattaactcagcaagagtttagatgtaaactactctgatatagaatttgttgtcataaaggaagggaaggtttatagtatctttttttttttttagcttgatttattttgtctttaaagattgtcatttagtattcttttattatctttattgttattattttattatttttttgtagaggcgaggtcctactgtgttaccctggcaggtgttgaactcctgggctcaaagaattctcccagcttagcctcccaaagtgctgggattggaggcgcgaaccactgcacctggcctcatttgatagtcttaatcatcttctggctacatttaatcgtgcacttatatttagttactgattaatttctcctcttcccaatcatttttcttttcctaccatttagacctagggactgttttaaatcaaatggaaactagcccactacttttgcatattcattttttctacaaataattgagtttttactctgacagttaccacactgtgcacggaggatatatagtggtggacaagacagacctgtcccttgactcatataagttatagcctctatcaggaagatagacacttacgaaggtaattgtagtaaatcacacggtgtgagggacgcttatatcaaagagaactgacctaggtccaggtcacggagtacctcctaacagaagtgacactttctaagctgagacctcaaagtaaggactcgctagcatgtatgaaggcccagaatgctgatatgcagtagttatatttgtggagttacagtaaataatttataatgaattattacaaatcagagttatctcagtgacattaaatggcagctggccttcacgtttgtttacacagtctttgtgcccctacatcaagctgcctcctgttgtctatttcatcgccttctttctttgtggatactaagagttttctcagttacttctgcttttgtttgcatcttcaatctcttcccctttgttgtcccctctctttatgtgtaatatgatcagctttctattgaaataatctcctgatcttggtactccttatactcttcttccctctctccttttctattagatatatttatagccttcttccacccatgaaggattgactgctacaggaatttccctcctacaattaacaactcaaaaacagaaaccatgtgaaacaactgatttcagacattgggcaacattcagtgcagaacagtgatctcttcttaccttccaaacttacatgatttttgtttcttaaaatatacttcatatgtatatcaaggttaagtgttagggaagcctatatttaagacagataaaagattttttctacatgtgtgaagccttaaacaaataaacttaggaaatgacttgtcttaaaagtatagctgttgctttcaccaagcgtgttaatacaatttatatagacatttctcatttactcaagatactttgcttcagagctttctgaaatatttcctaagaatatatattttctcctttaatagtttttcacaccattttaagggactaaatatattgtctattgaataagaaaaaataaaacatcttagcttttgtcttctcattaaatacgttatacatacatggctttaaagattccagaagacaattaaggacttgaaaattagtttgtaattattgaaactgttttgtattccagattgcattaataataatagttgacttttataggatcctgaataaaaaattttttctcagatcttagtgtggttcttttaaaaaaaattttttttaaacaattttttttccagtagagataggaccttgctgtgttgcccaggctggtcttcagcttgtggctgcaagcagtccccctgcttgggcctcctatagtgctgggattacaggctcaagccacagagcccatccttaagtgtggttcttgatttctgaattcatttgtttgtcccatgttattttgtaaattctctagtccttgcatgagggaggtacctgtgtgatggtagcagctattttcttaacctaactcacatttttatggcatcacactcacagtatctgtatgactctacatgcccaaggccatgtgattcacacgttaggtaaagcagcatctaggaaatggaaatggaagttagggtctagtgggaattaggtctctgcactggtccggctatacgatcagcagtgagtccctggtgtagccttttggtattatcttggagggatcaataacaacagtccaatgacttgttagtttgtctcagtaaactctgcagcatcttttggcttatgatgatttttgatttaataatattcagagatgtattatttaaaacaactaatctacttggaacctaagagaattctccatttattactaatatttgtctatataatacttaagcagataaagaccttataaattgcaaactagctgttaggtatttgataattctgtacttaaattggaatataaatcattatttgggacatggtttgcccattgccacctgtgtgtatctgataggattgaaatgcttctctctgtaggcgcatgaggcagcactggaagccagagccagtccagagatgagtgaccgtatacagcacttggagagagagatcaccaggtacaaagatgaatctagcaaggcccaggcagaagttgatcgactcttagaaatcttgaaggaggtggaaaatgagaagaatgacaaagataagaagatagctgagttggaaaggtaagaaagggaagctgattgggactcgtgaggttaaagtatggtgttaaaagtacacttttggggacatactttttcaatatctgactctgaatttaggttctcgagttcttgctattactgtattagctgcatttttctctaggtcagtgtacgttctctgttgcggtatctaaaaggcaacatagaatgggaataaactgggaagctgtggactgtaacatcattgattggcaaaagagaaagtattcattaatttaaaattaaaggtttttttttactggcaaatcaagagaggacagatgtctactttttaatttctgtatgtaatgaccaaatgatcctcaagcataaggagttaatcttttatcactggtttagacctttgttgttgagctaatgctctcttgggctataaatttttagacttttcacagtttttattgttgaaaaacaaactgttacttcagtgcattagatcaaaattaggaggagagacactttgaggacaatttaggagccacgaatgtgttttttatgaagctgtctctgacttggaattctttaaaatattctgtgttttaacagatctaggcagacaggtctcctagaagttttttggtgtgttttcttactattttatgctaaaggtcaagcatgtgcctcttgacctcttcttttacaccacatatttaatataaatttaaaagtatgcagaaacaactctgccagtagaactttattgatcacctatattctgaacagccagaaagactgacagtgacagaacggcgtcactaatctacttggccttttggggactgatccttaagaatatatttttttaatgatcttgaaggctgagaagtgttagagtacttccataaattttttactaagttttaaagttttggggttagtggtagacttgatattgtcctctgaagttattattttttcctattctgtagtcatagaattttaattttcaagaaaccaaaactatgaagtctaaccttcacagttctccttcactgtactgaaagtgtaaataacacggactgattacctggtcacttacttccttttattttgatattgactctactcattttgttcagttctggataagacatatggataaaattttttaagtcagaattttaaaattaaaatagcctcaagattagattatgtgcgtttgttatgtcttcatttttatactgcacccttccccgcaacacacacatgcatgcatgtgtatatacccctcaccccttatgtacttacatgaatacatgcctctctttgcttgtggaaaggcctggaatctgcagcagtactgcatagatattaaaatgtggtgctgttgattgattagtgacttcccactaaatatatttcagaaaagaaattccttgaataagttttatggtttaatttcttattagaaatctacatttgaaattactgcttgctattccaggcagcttgcttgaaaacgtttttgattcatttttggcgccaatattgatttttgggagatggatgtgaaccgaaggagagtaagaaataggaccaagtctgtatttgatatccaaagcacaccaaatagcagcttttattagtcactatatttctcgcattttgagaaagagttgtaaatgatttactctttccacagaatgtaactcttataaaagttggaaaaagcactgtacatttctgtcctctggccctatagcattataattttgttttaggatttaacacagtttcttggctactggaggaaaaaaaaaagaggaaacagctttcataactcagcttttgctaccagctttgtaatttgttacttggtaacatagtttaagatgttaaataaacagtagaatcatagaatttgtgaaagtgatctagcatggcattttatggaagaggaaaccgaggcccagagaagttattgctgaagtgacacagtggttgagccagggctaatcgaatggggtttgtaaattccaaatcaattttctttctgttccgccaaggttagttatgttctttttggacttcctggcaactgttatttgaaggctgcctacccttaggtgatttattcttttaccccgtctggacccaatgtcttaagtagaagtggttatatttagtattatggcttgcttacaaactaaggtagattgtagttttcacttatgcccttgaatgcgatttttataaactgagctctgcttattttaggagataatcagtgcattctttgtcacagacagttggagttatattttacctcttgttcccagatttagtactgatttgcatgtgtgtggccgttgtgtttcttactaatcatttgcttcttgtgttgccatttcactatttcctgtgtgtatgtctggctgcctgtaatttatcatttgagtttcttcatttttctttttgttttatcatggtcctgttccattggggtttttggtgtctgtgtgtttatatgtgtatgctccttctgccccttgtccgtggctgtttctcagaaagccagtctcctacagattgtaccctccgtgccaggtttctgtccctgtaccatcgggggtttggttcgggacttcctgggacagtgagcgttatgtaaggctacagtctacactagagtgaattgctgctgctgctcttgctactcctggggcttgttgaattgtgcttgatcagaattaaagaacagctgattatatgtcaagttgaactatacctctttaggtaccttactttttgataaaatcggtctgtgttcattctggtaaagttctgataatgctggttgtaattgttttagtctttgttctagcccaccttttatttagttgttcttatgctggaatactccttaaatagctcctcaactaatgtaactgtagcgccacaccgtagattcagcatgtagaattaatttcttaagggtgttcagctacccactaagtgcaaaaataaaaggagactgttacaataattgaactcaagaaaatccttactattctttgcattttatagtgcttcttataaaaggatctccaatattaaatggttcagattgtgttgtgaaggattcccaggcctgttctttgtgatcgaaagaaataagtgaatagttccttcccatgttggctgttacagaaaatagtagttcttgtcagaagatgatttagtgttgtactactctcttgaccccctgaaattttaaaaggaggattgggtaagcccactaatacatctataaatataaaatatttccccaattaaatctaagaagtagtacttctaaattcacattccgtactgtggtgcatattagttggaatccagtgagaagcagaattagtaggtgtatatatatatacacacacacacagagataaatacgtatatacacacactcatatataaacacacacagaagcatacatgtattatgagatttatatgtgtatttgtacatatagtgatatatgcctacatatattaagagatttattgcagagaatagtcttgtaaaatcgtggggctggctaagcaagactgaaatccctgtggaggctacaggaagagaagatcatgagcaggatggaacctgttgcaggcacaagccaaagctgtggtccacaggcagaatttcttttctctcctggggaaacctcagccctgttttaaagtctttgcaaaggattcatttatgcccattgggattatctaggatagtcttttttacttaaattgattagaggctttaattatgtcagcaaactaccttcacaagcaccatctagattaatatttgatggagtaactgggcactgtaacgtagacaagttaatatttccaaaaagtcatcatctggtggttctggatagtatagaaaaaaacaaacacatcagagtttgaaaagtcgttaggtaagtagataaatttagattaacctcaggaaccctgcatgtaactgagaatttctctcctaaaatgagcatattagagtttctatttagattaatagtgagtaggcttttctttggtataatgttaaaaatgcttagagtgactggacgcagtggctcacgcctataatcccagcactttgagaggcccgaggcaggcagatcacctgaggtcaggagttcgagaccagcctggccaacatggtgaaaccccatccctactaaaaacacaaaaattagccaagtgtagtggtgcatgcctgtagtcccagctactccagaggctgaggcaggagaatcgcttgaactcagaaggcggaggttgcagtgagccgagattgcgccactgcactccagcctgggcaacagcgagactctgtctcaaaaaataaataaaataaaataaaataggccgggcgcggtggctcaagcctgtaatcccagcactttgggaggccgagacgggcggatcacgaggtcaggagatcgagaccatcctggttaacacggtgaaaccccgtctctactaaaaaatacaaaaaattagccgggcgcggtggtgggcgcctgtagtcccagctactcgggaggctgaggcaggagaatggcgtgaacccgggaggcggagcttgcagtgagctgagatccggccactgcactccagcccgggcgacagagcgagactctgtgacagagcgagactctgtctcaaaaaataaataaaataaaataaaataaaataaaataaaataaaataaatagcactcagaagtgtactggaggctgatacagaattgtttgctgtctgctttttcactcatactgtcccttttagctgaatgtgcccatgttatagcaacacactgggaacattgttcccctgtgccatatattgtattgtgccttataattttgctttttaatgtgctttgttaccttttttctaataccataatgactaatggattcacagagcttagtgtttgcagcagaaatcttcaattttactctaatataagattgttagattcaataatgcccttcaaaacttgtattcagagaatggcaaccatctgattttcgtataatttagataacaaaggttgcctttggtttatcaaagttagaaattttcagtgatccaaagaataatagagtcttttattaatagtgataatagtgatctaaagatagtgatctaaagattaataggaattgtagatttactatatttcctgatttgagggaatatacgaaccaggattttaatggatgtatattttttggaggggtgtgttttgaaatttagccaagggattatttatggaatagtcgagaaggatctgtctgataccgttactgatgtccccgagcagcgatttgaaggaggggctctataagaagtcctcagaagcccctaaaaaaacctcaacaactttgaggtgtaatttacatacaataaaatgcacgcattttaagctgattgtttgaggtttgacaaatctgtgcacttacatgactaccaccgtgatcaagatacagaacatttcctcatccccaaaagttcccttttgcccctttacagcaaatctcttcccaaccctagccccagcctttgcagatctgagacccacttttaaaactaattttatacattaaacttcagtttctcccttttgccttaacatttagttgtctactttcccattccaacacaaccgtaagtatttgtcattccctgtttcctcggctccagaagtagattcggatttttaaaggcaatcaggagaatggcattctgtttcttggtgactagtcacgcgttgagcgtatgtgcgttttgatttgaaggaaaagccacggggagtgttctgagaatgattttcttataagaagaacgatgacccctttctcctgaacattatcttgtctggatacgacacccgtaattgctgcagctacttctgccaacctaagatgaaaccagtatccagagagtgacagtcaacaaaatcccagcacagcagagctggaactgaaacggactattcctgaaactacctctgtgctgcttgtgacgtgagataggacaatttatgactgtttcagccagtttgagtcaggattctccgttacttgcaacccagtgcattcaaatggatatagataattatgtacttctttcccgtccccgctgtttttgtaatggaagccatcattttgaaaagagttaacgttttttgataagtcaaataaggatcagtgctgctgaaagcaggaacaacataggggccctgaccagattggagtttctttgtctacctaataccttccaaatcaagaaataatttccctagtattttaattacttccccaaatcaggaataacttcctcactgtgcccgttttggttctttttaaaataaggtggtaatttgagggtaagagttaaaccagtcatagattattctatgccattcttttcaaatcagcccactcaggtatcagtcctgcttttcctttgctttagtcctctttattttcctcggtctctgcctccacctcatccgccacccaaatgcctagaacagatctcaccctttcatcttttgagaggaatgcgtatagcagattttcgcctccgactaggcaactgcttaaagaggaatgtattttgaatctaagaaagatatccaaatattttaatgcaatttgtttagttatatttgttcattttagctaccccttctacgtcatgactttttgggttgatgggggtgtgtgttggaaagctatctaatacaggtttttttttttttttttaaagacaaaatgtcactcttttgctcagactggagtgtagtgacgtgatcacagctcactgtagcctagacctcccagcctcaagcgatcctcccaccttggtgtcttgagtaggtgggaccacaggcacacaccaccatgcccagctaatagtttaatttttttgtagggatggtgcctcactatgctgtccaggctggtcttgaactcctgggctcaagtgatccccttgcctcggcctcccaaagtgctggaattacaagcatgagccaccacacctagcgcgcatgctctctcctctctctgtctctctctctctctctctctatctctatctctatctctctctctctctatatatatatatttaagacagattttccctctgtcacccaggctggagtgcaatggtatgatctgggctcactgcaacctccacttcccgggctcaagtgattctcgtgcctcagccttccgagtagctgggaatacaggcatacaccaccatgcccagctaatttttgtatttttagtagagatgggattttgccatgttagccaaggtggtctcgaactcctggcctcaagtgatctgcctgccttggtttcccaaagtgctggggttacaggaatgaactattgtgcctggcctagatttttgttatacagatgtttgaggttaaacgcctggtcctgtattacataagtaggcagcagagtcttttgcctaacaattccagtgtctgtcttattcctgaaaagaaatccttttcaggtgttcagttttcattaatgacctcacctcctagaagaggaggctgtagacagctagatgatccagagtctgttcactggaggatcttattgaggccacagtcttttcccacatgctggaatgcccacgtataggacaggtactgtggaattggcctgtatgtgggttgtttgctgctaggggccagtttttctacacatgtactttttagtgcttctctcagtctggactcagttaaagggttacgtctggctcaaagagagtaagacttaatcaatacagaagctgttgtcatttcatttgtagattatgctagcattggtgtttgtctatagcctgtccaatggctagaaattctggtgatgaaattttagttccttaaggtctggttgagcgctactggaaggtattacttaccataccacagaggctggtcatcccagttgtcatgtgcccagaatgcagtagtatcagaaagaaactctcatccaggctagagtgcagtggcactgtcacagctcactgcagccttgacctcctgggctcaggtgatcctcccacctcagcttcctgagtagctgaaactagaggcacgtgctaccatgcccacgtaatttttgtaatttttttgtagagatggatttttgccatatagcctagactggtctggagctcctggactagagtgatccatctgcctctgcatcccaaagtgatactattacagaggtgaaccactgcacccagccctgaactttggactcttaagtctttgatctttccatttttgaagccaatattaaatgatagtagcttgggaggttatttggttggaaagctaataagtaattttggatcctaaactattaatactaatttcaggtcttccaactctagtacagagacacagaatacagagggaaagccaggatgttgcactgcaacaattattccgagaaagataggagaactggagatcagttttgttgttcatatatacataaaattctcagggctagccttgtgagtagttttgatggaggtaactttttctggtttgtggtggttaattttatcttctttgctaaccatcttttccatgcctcattatattagtttgttctcatgctgctatgaagacatacttgagactggttaatttttaaagaannnnnnnnnnnnnnnnnnnnnnnnnnnnnnnnnnnnnnnnnnnnnnnnnnnnnnnnnnnnnnnnnnnnnnnnnnnnnnnnnnnnnnnnnnnnnnnnnnnnaagtacattcatatgcctaaaatattcttatacaatttaatgtaattcagtctaattacttttagattggtagattaaacaaaagtgtagataactttccctttctcctttttgtcacaatgaaatgccagttctgacattatgtttgtattttaacatctctgaagtttggatacacatacaagtaaatggcatggtataatctaattggtataactttttttcttagtaatataaaatagtttttactatgatgcatcttctatccttggtgaattgatgttaagaatacgttcaaagagagtgaataaaattgttttgttgaatgtgggagtaggagaaaatagtatttcttaattaatattattttgtcatatatttcattttaaatgtatgtgtagtaaccaaatgaatgtatttactagtgtaaattgtaaattagatatttgactggtttacctatatcctgagtttattaggttgacccaaaatggtttcttttggaccatctcattgggaaaatgggctttatgatattaatttatgttagtatcacattatattcaggcatctattgcatagtgtaacccgaaaatgtaaacctaggtatttagtctttattcttgtaaatatttttccttaaatcttaaattgatactcatttacaatgtcttcaaagatctaccatatagaaattaagccgtatgcaagtttgacataaactgctacataattcatgaggaaagtgtctctttagagaaaaatattcttccttttaaatttatggatacgcatcttcaatccatgaagtatagtgtcagagaatatgctcttaatgtggttagagtggaagagagatgactggggctgcgaatggtggctcagagtaattatataatgtgtgttattgcttgagggaggatggtctgtgtttaaaaaatgaaaaaactgaaaaggaaaagaaagatgccagcatattacaactgaaggtgactggttttttatctgatcctgcttgcttcagcttgctttctggggaagctgctggtttctttcttcttcctccttgatgagtatcatagatttcctgtgaaagaagagtaagttacaaagctttttgtagtcattctgttaggttgtcttcgccaagtttcttgtgggcacagcaccttataatttgttactgtggtcttatagaaatctgggtttaatggctactgtaatgttttacctaaaagtataaacattaggattacatgtaattcgatgtacagattttttctcctaaagttatttcccaagagttatagtttagctggatgtggtggctcgtgcctgtaatcctagcactttgggaggtcaaggtgggtggattgcttgagcccaggagtttgagaccagcttgggcacatggtgaaacctcgtctctacaaaaaatacaaaaatcagccaggtgtggtggtatatccctatagtctcagctatttgggaggctgaggtgggaggatcacttgagtctgggaagtagagtttgcagtgagcggagattatgccactgcactctagcctaggtggcaggtgaaaccctgtctcaaaaaggaaaaaaaaaaaagagttgtaatttgatgttaaagtgaaatatgattcatgaataataaagtaggtaaaaattaaataattaaagttgctctctggcaggagtacattcagttttttcccatggatttacccatgtgttatataaaaacttgcatacaaaggagattcagttaatgttcttgttcatctaaaactgttttgacttcctatgtcacgaccaatgaaataaaaaggatcattgggaacaatcatttagagattggcttctttctgcctttgaacattttgaacattgtctgcattttacactgcattatagatgctaaaggttcatggagttttatagattcctgaggaagcatcatcaaacatacaaattgtgcccaggtgagatgtcagcagacctacattctcactctttttgagacggagtctcgctgtgttgtccaggctggagtgcagtggcacaatctcggctcactgcaacctccacctcctgggttcaaccgattcttgtgcctcagcctcctgagtacctgggactataggcatgtgccaccacgcctggctaatttttgtatttttagtagagatggggtttcaccatgttggctaggctggtctcgaactcctgacctcaggtgatctgcatgcctcggcctcctgaagtgctggggttacatgcgtgagcttacccccnnnnnnnnnnnnnnnnnnnnnnnnnnnnnnnnnnnnnnnnnnnnnnnnnnnnnnnnnnnnnnnnnnnnnnnnnnnnnnnnnnnnnnnnnnnnnnnnnnnnnnnnnnnnnnnnnnnnnnnnnnnncactgcaacctccacctcctgggttcaaccgattcttgtgcctcagctccctgagtacctgggactataggcatgtgccaccacgcctggctaatttttgtatttttagtagagatggggtttcaccatgttggctaggctggtctcgaactcctgacctcaggtgatctgcatgcctcggcctcccaaagtgctggggttacatgcgtgagcttacccccgcccccactgcccagctgctacattcttactctgtatctgccagtcacacaccatgtgattgtgagcaagtcgttgtgtttctgtttttcatctgttcatgttacaaggtaacaaatcttgtcccccttatctttttttattctcacaatgagtttttaaaacttttagataccgaattatacttgtgcaagagatcactaagttttagaagacattaaagtataattggaagtggtgcttgcattcaagaaataaatattttgtttcagattcttaaggtaaaatttagaccatgaagataatccagatgatactggtcattggaagccctgactatttggaggatcatactaatttcagtgaaactgattactttttaaaaaagaaaaaaaaaccctgcttgttataaaaggcagtcatgaactgtaagggctacatgctctgctggaacattaagcatgactgctttaaatctcctactgctaagcagcattggaaatgaattgatgtaaacagacctgtgcattcttgttctttattgcttttagattgcaccatttgaggattttggtagatttggagtgagaaatactggttattattaggagaaaattatgtcttaacatttgagaaaattatttcaagttcttccgagtggagttctatattccacagaagctgtgtttttctgcttttgcttttgggtcacttggatcctcttaatggaatggggacgttaaggcagttagttataaggtgcgtgtcaaaaaaaactaagcccactaaaattgtgcagttacctaatgccagttctaactacttaaatgagaatgggatggctgaccttctctatttttcttagtgtttaagaaattatgtttttttcgtgccccaggaaatgttaaattttagacaaatttttttttctttagaaactttcattaaactacaatggtgtaatctaataagaaagtaaagttgttgagagttgaaaatctgcaatgattcttttttagtgcctgcatagaatttgtgactccttcccttctctaatcctgcattttataatgtccatgaataatatttctgaatattgtccttattaattctttctaactttctttttcacactttcttcctggatttgctgtttccttcagtctcacctcaaggtcagtatgcttgcactaaaacaaagattatgtggttgagcatggtttgtgaacattatcttgaattcttataggaactgaacgtatttcaggagagagatgtctgtctaggaatctggctgtgagtataaaatgtcaagagtattgggtttatcagaagagtaggttcagatttttgtgctttgaaaaggtggtgtgagtagtcagagagcaagaaccagatggccaggttttgactgagagagaagtggagatgaaaagagccatcagaggaaagaggaggggaaaacattgcgttaatttaattcaacattcaatagagacattctggctattaaacagggtaaataaagtgcagcaaaaatgatggagggaaagtcacacctgtctatggctttatagaagaaaccttgaattatttactgagacaaactttcagacacatacacacccacatcctttaaattttggtttcatttttgtgattctgctgggtggtggaacctagtgataacaaaacaacaaccattactgctgtttatatgtgccagaggcactgtagcagaacatactttgtttcagttgatcttagcaactatgaagagagatttattatttggattttttaggtgaaaaagcacaagtgcagagaccattaagtaacttgcccatcttcattagtaagtaaatagtaagagaaacagcacaaaacaatcaaacctgcatttaaaaagttacttattttgcatatgagccatgtcaatataaagtgtgaggatttttgataggattcagaaatgagcctgttaatatcatatgtgttttacttagcagctacctaataataatagtggttacgtgtgtgtgtatacgtgtgtgtgtgtgtgtgtgtgtgtgtatttgctgtttataaaagcacttctttgactgtcaacagctagcatatgggttacactgggataagtgttaaagagttagcctcccaaaaaagaaaacaaattgaaaaaaatttgtgacctcccctattttgagaaagctatattcgttacagaagaaatgttacagtgtttgtcataaaaatagcaaacacaaatgctgcatttaaaaaatagattttcccatttctacattttctccacatattgtagtaaaacagtatgagtaccacttaagtaattccaattatgacacaatctgaaagtagttgagttttagtagaaaaatttcagaagtgttttgccttgtgtttcgagaactttcatctctaactgaagctttaagctgactcatattttagtggaaagttttaccatttgtcccgtagttagtcctttgcatgactggttttgctctcagtctctctaaatgaaaccctgggaaaagcttcagaagaatttgaccgtgaagccattggtttatacataattcactgagttacaggttatattataatattgttagctggtttattttagttaacttttacccagcagcaaatgccattaaatcatacttatttctaaataagtttattttccaaggaatacaaaaaaaatagtcattgttttttcagtggcaaagatcatcttagctgcagtatgctaagtttcaagtctctcttcattccagattatgatttagtgcagtattttttttctagatagaaacattttaccattttaattatggttttgccaagtccagttgaataggtcataaagagagtataatttattactgctttgatactggattgtttgggtgacttcattatatgaccttgggcaagatacttaacctttcagtgtttattttaaccacttgttttgtgtcaatagtgatgcttagctgtagtatttgtattttagtgtctctactaaacatttctattttgtagaggtttatttttattcctctcttctcccttgtcttcttcccttgctctcctctgtcttcctttgcattcagtacagagtagtgagattttatttagagtgatactgaccaaagactcacattttctatcttcagacatacacatctttttatttcctgttcaatgacattagcaccagagaatgaatacaaagaaattattccatgtatagatgaaaatatatgatttggttcagaattcttcttttggctaacggtcattcagaggtgagagctataaatgtcatctctttattctcattaacacttaggtctaaaattgagctcgatattattaatatctatgttttaattatcagttaccattgtagacttgtttttaaaacaaatgtttggaatgtgtgtgatagttcctaccaacttcattaacccatttatgccagaggttgcacattttttgtgtgtgtgaaaaatcagatctccgtgatgaccttgagcagcaggatgtaaataactcccacaagcttagcgttccgataatagaacactaggcataaatgggttaagacagcagcaggatgtaaataactcccacaagcttagcattccgataatagaacactaggcataaatgggttaagaccagagtccctgtgttgttaaaagttaaaatacttttctactttgcccaaaaaaaatcccattgttatagtctcttttatatagtttgatgaaaacatttcacattggtttctaaaatctaacttaaatagttatttctctgataacacactttagaaagattttttacattattgtctggtttcattaagaaaaagcactagttgctaaaacctcataagatacgtcactcacaaaaatggatgtaattgtatttttgaaagggttagtttcttatttttttagctacagcttttttttttttttttttttttttaataggccctagaaaatttctgaccccataaaatctatttacaaggaatttgacttatgggcaagagttgataacccaggagaatgatctgttgttatttgcatttttagctcccacttttcattcctttagctttcttaagcaactctgttgttcaagagtgtactttatttatttttctttcaagtaatagtgcctagtggttttgtaatagcctgcacaagcaagtgtagcatcttctctgttaaatgacatctgctgatgtagtagtgtactcttgaataattcgttggtaggaaaaaacaatatgtgaatacagacttgtgctgatcttcctaactcttttactgaaaatgatagtttatactgtcatgcattgatcaatggtaaatgtttttctagatagcggttgtagatcaccacaaattctgtaaatgagctgaagatggcaaattcaacagagaagggaagaaagaatatatttaaaattagccaaaatttgagtttttatagagttgccagatttagcaaataaaaatatggatgcccaattaaatttcatgtaaaccacaaatcatcttttagtatgtcttacaataaatattgggccatacttactctggcatccaccccccatctcaaaaccacagaaacacgtctaatttctaattacagtttgacgctgttaaaaatgctatcacattctttatctcacttcaactcataacgactatatgaattggatgacattttcccattccacacatcagaaaattgagtttagagagattggaggatttacttagggtcatagctactaagtgtcagaatctagggtacaaatctagtttgtctgatttcgagtttacctcacactttcctttcctctgtatcaagcttgtccaacccacggcccacagcccatcgtgcagctcaggtcagctttgaacgtggcccaacacaaatctgtaaactttctttaaacattatcagctttttttgtattttttttaagctcatcaactattattagtgttagtgtattttatatgtgggccaagacaattcttattcttccagtgtggcccagggaagtgaaaagattagacacccttgctctgtatcttgttctgttacgtttttgtgacatctagagatgacatctaggttataatacatttttnnnnnnnnnnnnnnnnnnnnnnnnnnnnnnnnnnnnnnnnnnnnnnnnnnnnnnnnnnnnnnnnnnnnnnnnnnnnnnnnnnnnnnnnnnnnnnnnnnnnnnnnnnnnnnnnnnnnnagcctcccgagtagctgggactacaggcgtccaccacctcgcccggctaattttttttgtattttagtagagacggggtttcaccatgttagccaggatggtctcgatctcctgaactcgtgatccgcccgtctcggcctcccaaagtgctgggattacaggcttgagccaccgcgcccggccttctaagacatttttaagtttatgatttttagatcctggagcagggggtggagggttggattcctggtgtcatttgtgtgcacagtgcccagagaagcagaaggtgtggtcttggagtggaaactgcacgcagctctttctcttatttggcagctgttggcactggtgttccagttgtgtcttcttttgattattgtacactaaggctatatatatacagtgcttctcaaacttaagtgtcatacagattggatgggagcttgttaaaatacagttcttatttgatggatttggttggggcttgaatttttctacatttccaaaagctcgcagtcggtactgatactgttggtctattgcgcatgctttgactcacaagactttagtgaattaacgtttttggagtagatttttctcctttttaaaaaaattcacaaacatttaacaatatctctgttgatttatttatactaactcatatttgaacttgttataaaaaccgacctttccttgggtttaggatatcaaggtgaccgtttgcctctgttaaaggacgcctgaggttttctattggcatgggtacaagagtcaggttgaaatatcaggaggttagagcaaaagcattgttttcactggcacctgttgccttgttacttcaaatgtataaaaacatattgagcagtggaacaaagtcacaagaaatttagggtgaggcaactggagaaaagagtcacaaacttcagaactgttgaactggcttcttgggtatggcttatgttttcacagaaaccttccttccaacctccagtttctgttacccatgtatgtggctttaaggtctcagaatttgagattgtacttggggagaaacagatgaggaaatcagtggcgttaactggcagctagcagacctataagtgatttggtttaattgtgcacacattgggattgctctgtctttaagacgatctttttaagctagagtgtttattcactgttggcattttctttgttggtgaagttggattattttgtttaaccttccagcccttgtctgggttgtcagatgtttgagcatgatagcaaagatcgcaaaactagttctttttacaagcagatctcatctttaaggtatagtgtaatgggattcagaaacttgacttctgtcataggcaggagggaaatgtatgtttaatttttctttacttcgtgttccctaattaatatgggattattatttttctttctttctggtgtgtttgggatagttgctctcaatggctacaaaagacagttttaacattctttagctagggctgggcgtggtggctcacgcctgtaatcccagcattttgggaggctgaggtggacggatcacgaggtcaagagatcaagaccagcctggccaacatggtgaaaccccttctctcctaaaaaatacaaaaattagttgggtgtggtggtgtgcgcctgtagtcccagctactcaagaaactgaggcaggagaatctcttgaacctgggaggcggaggttgcaatgagctgagactgtgccatgcctggcaacagagtgaaactctgtcccaaaaaaacaaacaaacaaaaatatttagctagctgtttggcctaggtattacagatttctatgttattgtaagtttctatattaaaaaatcacttaagtatgttacacaactattttgaaagtgttagtgaaaaataatccccttcaaatgcaatcttttaaattgagaatttttttctttgagacagagtttcgctcttgttgcccaggctggagtgcaatggtgcagtcttggctcaccacaacctctgcctcctgggttcaagcgattctcttgccttagcctctggagtagctaggattgcaggcacgtgcccccatgccaggctaattttgtatttttagtagagaccgagtttctctgtgttggtcaggctggtctcgaattcccgacctcaggtgctccacctgccttggcctcgtaaagtgctggaattataggcgtgagccaccatgcctggcctaagttgagatgttaaaaggaaagttctttgcagatgactttccaagaaaactagaaggaacaattggcttggggaagtgatcgtaatgatatagcttggatataatcagaaccttttttctgttttttgagatggagtttccgttcttgtcacccaagctggagtgcaatggcgcgatctcagctcactgcaacctccgcctcctgggttcaagcgattcttttgcctcagcctctctagtagctggcatcacgcctggctaattgttttgtgtgtgtgtgtatttttagtagagacagggtttcatcatgttggccaagctggtctcaaactcctaacctcaggtgatccatcctcctcggcctcccaaagtgctgggattacaggtgtgagcctctgcccggccataatcagaagttttatacaatgtattgtgaggggaaaactcaccacaggctatctttaccttatttaaaggaggtcaattaaatataaaccatagtagcttgcttattgtcatgattagtttattgatgcagcagtagaggaagctgactctttcctgcattactgcaaaagctatctaatgcttcctcctgtccactctcatcatgcttccctgtcagcttcttccgaattctgagaaatctgattatatcacttccttatataagtcctatatactttgggtaagctacagattccttgcttagcgtatgattgtttggctttgcttacctttagcttcctttttctctactctctcctccaactttaagctatagtcattctgaaccgtgaggttttccccaggataacacattctccttttcctcaggtttttgttcatacttcttctctgcctagtactggatcagctgcctagtaactggacttaatcccttaggaaagatattggttttccgggaagcctttcctgatcgtcaccgccacccccacctccagactagcttaggtctctttcatgtccactctaacagcgcttattatatactgtatttccttagatgcctgggaggtatttgagaacacgaacaatttctattcatgaaattgttgcaggaatttttcttagttcagctaaagacagggtccttgtcacacgaccacgaaaatgtaggcttgcagacgattcgaacgttgagtaggatagggttttattgggtgaaaaggaaaagggggaaacagggactctctttaggccagattccttgctagagtgcttctcgccttgcagattgaatcccaggttacaccaatgaaaaggaagggccaggctcctccctgctgcacaaggtgccggtttctgtggctccatcccagggtgtgctcctcccagcgcaccgctggctggagtttctctggggaccccttcctacctggctctctcaaaattacatcctcagtgtttgatatataatagtagtatttaatgaaatatttgtctgtttaatgagtagtgaatatgtaaaaaacttagcaggctgtcaaagcttagataaatgtagatcctcttacatcccagagtctgttttctcctgggcaatgcctaaagcgtattttttagttgtctagtaatcctgattctaccctttgtgaggttagtcttcttcacctttacttgtaagctagcatttagttcagttttctgacttaccagtagtttttttgtagatgtaaaattatttccttactgtttctgcctaaatcctttagcttccattttgactattcacataaagagggaaaaaaaaaaaaccccaaaaacccatagtgtcttgcatttatatagtacctagtagcttacagggcactttcacattcaccatctaatgtgagtgaagagagaaattctatggaagaactaaactcatccggtcatactcatcatttcaagtggaaagaaagtggtagcttttaaaaggaaaagtacgcagaaacactgttttagagttgaagcttgctttcagaggagttgagttttaaggccgggtgcggtggctcacgcctgtaatccctgcactttgggaggttgaggtgggcggatcactcaagctcaggagtttgagaccagcagggccaacgtggtgaaaccccacctctacaaaaaatacagaaactacctggttgtggtggtgggcacctgtggtcctagctactcgggaggctgaggcaggagaatctcatgaacctaggaggtggagattgcagtgagcctagatcgctgccactgcactccaccccaggcgacacagcaaaactgcatctcaaaaaaaaaaaaagaaaattgccaggcacagtggtgcatgcctgtaatcccagctcctcaggaggcagacacacaagagtcgcttgaacccaggaggccggaggttgcagtgagctgagatcgctgcccctgcactccaccctaggtgacagagcgagactccatctcaaaaaaaaaaaacaaacaccaaaaaaaaatagttgggtgtggtagtgcacgcctgtagtcccagctgctcgggaggctgaggcacaagaatcggttgaacccagaaggtggagcttgcagtgagccaagatcacgccactgcactccagcctgggtgacagagtgagactccgtctccaaaaaaaaaaaaggaannnnnnnnnnnnnnnnnnnnnnnnnnnnnnnnnnnnnnnnnnnnnnnnnnnnnnnnnnnnnnnnnnnnnnnnnnnnnnnnnnnnnnnnnnnnnnnnnnnnaaaggaaggccgggcgcggtggctcaagcctgtaatcccagcactttgggaggccgaggcgggcggatcacgaggtcaggagatcgagaccatcctggctaacacggtacggtgaaacccgtctctactaaaaaatagaaaaaactagccgggcgaggtggcgggcgcctgtagtcccagctactggggaggctgaggcaggagaattgcgtgaacccgggaggcggagcctgcagtgagctgagatccggccactgcactccagcctgggcggcagagcgagactccgtctcaaaaaaaaaaaaaaaaaaggaaaagttgagtttttaaaaaaggaaatgaatccatatgagaatgccagggtacttacatcattggatatgcttctcttctggaaagaagaaagacactgaaagatgcagtgtcctaagaacagaggaatgcatgcagttaaccatggtagtggaatcctggtaaggtaacaactgtgtggagcagtgggtttctgccttctgatttattttatgtactgtggacgccatcttcatttaatatttggtgtcagagatctcccagataaacaatatttgctcataatttctgtagtagagaggttaaaagtatcacagttacagtcagacagacctgagtttaagtactagttctaggatgtttaaaactgatttggggtaaggattaaattttattgaaggtttgctcttttcatttttaatgtggagttaataaaaccttataaagacattttgaataagatgataaatatgctatgataaccattaaggtgcttggtatatgataagtacttataagggttattatagtattatatttagcatagtgctagagttagatataaacatgtaacacataacttcaatagtatcctccttccctccactccccccccccgcctcccctcaaagagtgaagaagaagcatattccatgtttctttggatcttaatgtgtgggcaaatttaggtatttaaatttctatattaatatataaaacagatacgtatgtatgtgtgtgtatatgtatacacacacacacacaaacacacatatatttggagtagggagaaaaaggatatgttagtaacctcttgcagtgtgccaaatcttacactaagcatttttcatgcattattttatttacttctcacaattctgtgatagatgggcattattcccatgtcatccataaaaaagataagaacactctgaagcttagagaggctaaagatcataatgagtagtgaaccagtatttaacctagagctctttagcccttcaaacttctgcttttaaccactctaccattgtattcctgttaggggtcctcacatcccttgggagaccttgaacatattctgagatttgcaagttaccatgtaaattttatgattttgcattttcatttcaatgacaataaaaaagtttatatacatattctggatcacctggctgaatagcttacaatgaaatactgtatatagtttcattgatatttatggatatcatctcactgtcttcaggtattactgttgtaattgtcatgggccaatgagaaaagaacagtggtgggcctaatccatactgttgctttttcacccagcagagttcaaatgatgccataccgtacttgtaagcagcaaactttttaaaaaagtaacctgacaaaatttctgagacagttggatcatcttatggctcacaacaaaacaacttggaccgtagtcataagtaccatgagtgtactgtgggcagcatttaacagcatgttcagttaatactggtactttgcattatgtcttttagtttgaattgcatttaatttgggaactctagatataatatttgcatttttttacagtattacaatttatcagtggatctagaaaatattttcttttacaattatactatattatactataatctggatacagaccctttagctcatggagatgaaggaattagttctgtttaggggagtcctggaaagcttttgccaaagcttaaactgccatttaagcttcttcttgcagaatgagtgcatgtatgctcttatgctcagcaaaaacaggggaagggaaagggtaaggatattaagacatctgaaaaggcaaaaaaaaaaaaaaaaatctattcctcatgcttactgcatgagggaatattaaaaatacaggtgattgttaaagacctttggtgctaattaagggaatatgggttttattacgtagttagtatgaatccaaaaaaagcaaaaagtatgggaatataaacaacttttataattcaattgtgtgcatatggaatctttgtaaattaagtcatgttttacataaaatcagaatcttattggttaaagactatttggaaatagtatgtaaatgtttttgtatgaaaataaattgtccccaaattttcagatttatgttaccttttttttggcctccccctctccttccttcctttccgttcatccctttttccttcttttcctctaggcgcatactttaaaacttgtaactttattcttctctctcatctcactgggatactttagtgattaatagtcttctacccaattgatttattgatttttattgtattttaactaatgtttattgagaaaactacgcatgagattttctgataactagtatttatttgcacagaaaaaggtgttattatttactaaatagatctgcttttattaatgattttatttatgccttgatttcccacagttagcctccagctgttacttctatattatgcgtgttagagtgaaatgtccaagttaaattagtttttaagctgagccctgtgaaattaccagctggagaagtatgggtggcatattactcctgcatatacattttcatatgttattggtgcagtgtgattaaactgtagcattcacaactttcatcattgacacagccttggcgggggcagtggggagcgggagtgcgtggaatgatatctacaaaaacacttttcggttgggaagagtgaaacaagataacaggaaataaaaggccatattgtctgttcagactggtacattacttttccaaagtcacggggctagcaactgctatatgtctgacttctaccaagaagggttggatccctggttgatcctgtgaggcctgaggcatataaacaagaaacatgaaagggagaggaaaattaaatgaagtaggagtgttggagaataataatacaatcaagggagaaaataatagaagtagaggaagaggctatatacacttatttctcttactatgaacattttactcagaagtgtaaggttgcatgtcctgttttatgcggtgatgaaaaattatgataatgcttaacataaatggatgctttgccccataaaagtgctcagcgccttcctctgtcatcatgagttaatcagcaagaggtccagagatgagcaacataaaagtgttccctcctcctcttttcaaacagtgaacaaagttgacaatatatttattctgtcataaatccaaaaagccaagactgcgttttaaggcaggggttttctttggttttctatttctcaaccacaccttcaagtttcttggcacagcacagccacagcattgtgtcatatccttggtctgttttatcagactgtataaattgattctgactataccagcagtactagatccttatctttacacagtttgggaaatggacaatgactgttttagaaaagcagctctataaattgtgctccggtgtgtgagaggaggtcctctgctttgcttttcctctagtctgctgccgttcctagacagtgtcatttgtctgatttggggcattgtgtagctgttctgggtagagtaaaccttcctgtaaatgtggaatggattgttacccgccagaattctccaccttggaatggtgatgctgaaagatacagttcagctctggctgacacctcctgtcttcccaggtcacttactttcgtctccactccggttattccatctgattaggaccttgaaataacaacctactacttttcttgtttgttttgaacctcgtgtggcctcacgcttccttccttacctgggtcagatttcatggtccagcactgtaatcactcccttctaaatccccttgacttacttgcttttctcttctgttgcttgcaaacctcaatcctaatttaaagcaagtgtcttcctacactgcctctgccctgagcagctgcatatcactgggcaagaagagtcacaaagcattgtggactggtctcacattgaatttatggtcacagatctcaaactgctcctaattctgcaggcagtcctaataaagaggactattagatttgatttcccatcctcagaggtgaccgtatcattgtcttctcttatcaaatctgcaaatccttcccctccactcaaagtttctggcttcacttgatataactttgagaaaattaaaataactggttgctacccagtgtgtctcccggtcattaaatctaccagcctacttgcatctatacctgtatcctttgcctgagtagtgccactattcctaaattcacctctgccaccttttctcttaatcctgtcccagttccccaacctaaagatggttttccctcattatccttctccctccttcattttcaaatttttgctttctcctggttcgcaagtgtactaacctgtttttagagttccacttaacatctttaaaaaaaaatccttcttgatgtgatgtcttattctagttgccaccctgtttctctctttcccttctcagcaaatcttgtttaaaaaattgactgtagttgctatctgcctttccttacctttcttcaagtttaatcaggcttctgtttttagtgctcctacgaaactgctgttgtcgagttatcgttaatatccatgtcaccaaatacaaaatcacttccatgacctcatcttaactttacctttcagcgtcataccacgcacttccttccttgaaacactattttcttcgggtgtctctgataccagggtctccttattttctccctctttcagctgtcattccttttgtggtggttctgattctaccactttcctctagacctctaaaaggctccactctcagtcctattctcatatatacatacatacatacatatatatattctcatacttcttttcttttttttgagatggagtctcactctgtcgcctcggctggaggataatggtgccatctcagctcactgcaacttctgcctcccaggctcaagtgattctctgacctcagcctcccaagtagctgggattacaggcgtgtaccaccaaaccgggctaatttttatatttccagtgaagacaggatttcaccattttggccaggctggtcttgaactcctggcctcaggtgatccacccgccttggcctcccaaagtgctgggattacaggcgtgagccaccgtgcctgacctcagacttcttcaagtctaaggcattcattatcaaaaacacagcaatagctgccaaattaataatatacaaggtgctccaggactctccacttcttacttacacagtgtctttagttaaatatcaaatttagttttactcagatctcttgatctggcccaccgctttcaaaacctcctcttccccagtttcccaccctcagtaaatggtactaccattcactcatcatgcaggcaataaatcaccaagcaatccttggtttttcttactccctacattaaatctgttagcccgatcacacctcaaaaatgtatctttaattcagtgattccattctgctctgtgaaccattatcccttgctcaaactactgcagcagttttccaagggctgtttctgtatcttacttctgtactagtcccatctccatagcaatcagactgaactctttttttttcctttttctttgttgagacagggtctcactctgttatccaggctggagtaccctggcataatctcagctcactgcaacctctgcctcccaggctcaagccaccctcccacctcagcctcccaactagctggaactacaggtgcagaccaccatgcctggctaatttttgtattttttgtagagacggggttttgccatgttacccaggctggcctcaaactcctgagctcaagttatctgcccacctcagccccccaaagagctgggagtacaggcgtgagccaccgcacctggcctgaactgaactcttaaagtagacgttatcactccttggttaaaaccttcctgtgctctcccatcatacacagtaaaacccaagctccttccacagcttaggctctgcatcctctggcttcttgccaccgctgtaaccccaccacaacctccccttccatatactccacctaccagctttgttgttgttaaaacaagctaagcatttttctatcctcaaagcctttgtaggtatgattctctgggcctcttctcctggagcataatatgtctcttccctgaccattgtagctgaaatacactgtttgtcacatccagtgtctccattacattgcctgttttaatttttttcctaggacatgtcactgtgctgtgacatccttttttgttagtttatgttcccgcctcccccttgtaaaaataagttcaatatgtttgttgagggtggggacattgtattcttttttttcttccttagctgtatttaactcttggcaggcattcagtaaatatttgctgaatagatgaacgagagccggctgtttctgaaaacgctgacaattgagaatgcatgctagttttaaattatggacaaatatgtagctttacatcagttgagagaaacatgaatatttattaggttactgttacttttattcgtgtttttgagcaattctttcatactttgtgataacaagtaattgcttccaaatgcaaaagacttttccagtggcctgcagagctcttcagcagggattggcaaacttcagctcatcgggcacctatttttgtaaaacctgacaagggtagcacaaaaagaaaactatatgcgacagattttacatgattcacaaaacgtaaactgtttgctctctgatcctttataaggaaagtttactaacccttgttgggggcggtggccctcctcacctgccttccccatctgccgctcctgtctgcgtctgcttcacctgggcctcgtgcccattcgcatttgctgtttccttcgggaggaacactcaggctcagtcccttacttccttcacatctttgcttagctattgcctgtgcagtggagcctttcctgagcacttatttaaattccaattccaccacccgttccgacacacctcatctcctttcgtctttttatttttccgtttgggcttatcactgtttgacctaccatgtattttactcaagttctgtttccttccagcggacagtaaactcagtgaggactgaggtttttgtctgttttgttaacggccatattgtcaaagatagcacctggcccgtagaagcttttattaaatatttgttgaattaatggtcatagattaaagttttatcttgagaaccaaccttaaaaaaagtcaaaacacttcagtaaacattgattaattgccataagacagtcctcatctcagatctatggagttgtataaaatcgggtccttgtcttcaaagaaatcagtgtagtagtgagaataagcatagaaataaaagacactaaatgtaagatgagactagttatgcagtttccttgctgattaaaaaaatgttgaattgattatttaaaatatttttgcagaagttaaaagtgtttatgtaaaactccaaataattaatagttttatgttctgtgttgacatcttttctccttttcattatggcttactttctttagacaattagggctatggttccatgaaaataaacccatatttaaaatggctttgaaatagtcaaaataattttaattaggtaaataacaagtgaaactattagcattttatttttagttttttggttactttttgggcaggtatttttttaagctacaattaggtatttaggtagtattgtaaaattttatgtcttaatttttatgttaactgtgagtggagctctttgggggaaggtaaaatgagacagagagagtgtgtgtatgtgtgtgcacgtgtgcaatatatacagtcatgagtcactgaacaatggggatgataggttctgagaaacacatcactatgtggtgtcattgtacaaatattgtatactaacccaaacccagacggtctagcctactgcacagctaggctgtaaggcatagactgttgctcctcggctataatcctgtaccgcatgtcactgtactgaatactgtaggccgcgtcacaccatggtatttgtgtacctaaacatgtaaacaccagtaacaatacagtattataatcttatgagactgcattgtatatgcagtccattattgaccaaagcattatcattatgtgctgtgtgactgttatgagtgtacatattccctgtgggttttttttgtttgttttttgttttttgtttttttttttaggagacagggtcttattctgtcatccagactggagagcagtggcgcgatcttggctcactgcaacctccgtttcctgggttcaagcaattcttgtgcttcagactcccaagtagctaagattgcaggtgccaacttgcccaactaattttggtatttttagtagataacggggttttgccatgttgcctaggctggtctcaaactcctgacctcaagtgatccacccatcttggccccccaaagtgctgagattacaggcgtgagccaccacatctggcccatattctctgtatgtaacatttcataaatattatagatgtttatatgtaacatgcacaatgcttcagcaatgtcattttatttttaattattgtatatttaagccctagcttaagcttctcttcttgagtgaagacacaaatacctgagtgaatttgattgataatatttttttaaatttgacaatagaagcatcctatttcttcttaaatttgtgtgggagattttatggtatagtaacatatagcactaactatatgtatctttctttttggtaaagcaaaacagccagtagaaatgtagcctctgacaaatgttgttactttcttaataggaaggagtaagttaaagacagataataaaaattcctttcctagttaattttgctgggtgtttgagatataaggaagtttttattttttagtgagtccattgttttagaacttcaaacaaactgttttccctcagagttttgttttgggtggacttgtcagtacggtattactaatttcctttttatgcatttgttcaacaaatgtttaatgagcacctatagaccacaaggaaccgtgctaggaattgtgaattttgaaaatgtatcagagaaggactttaacctctaggaaggcgtgttcataaagtatcgtgagacaggtatgtagaccccctcccctaatgtagagaacaagttcacatgtcgtaagagagattcagttaaactgatactggagttgggagcattcataatagttgtgatctagtagatttacctaaatttgagtttagattttaagagacagagtcttagggctgcaataacaaaataaatatgggcaaagcctgcctgacatagtctgcactgactgttgttccttaacattgtgcatttagtgtgcattcatatcccctgggaaccttgtgatagtgcagattctgacttaataggtcgggtgtcaccctgagtttgggtgtttccagcaagcactaaggtgatgctcgtgatggaagtccatggatcacgctttaaataccaagatggtggaccacattgggtaaaacttctggtggcagagacgaatacaaattcagatactgttttctttcccatctttgttttcctctcttcttacgcttctgtttgcttacatctgtgtgctagtggagagagttaaatcttttattcatcatttcgttgtttattataatagttgggagcttagcaattgtgagtctaattttaaagcattaatttatttatgaattactctaatttctcctcttcctgcttgaagaatggtaaaacatctacattcactttgaattaaattcagattagttcaggcaaaacagcagttgagagttttaacaaatctactaaaccattaaatctatggcacctcacgacaggaatttactaacatctgggttttcttgagaatttagatttaaatcaaactagatgttaatctatttataaggaaaaagaaagaaattcctcatttcacaggttctgttatgtctcagaatgttttttcctaaatatacattccagaaatagcctccttgtactcttttaatgtatatttagatgatatccccttttgtgtctcttcccagggaaacaatattgaaaaggataataatgaggcaagaaaatcattgtgtgttttcatcttttctagttaattcatgaattcagaactatacatgcattcataaacacgtgcttgcacacacacacgtacacagacacagacacgcatacacaagacaagaaggtggcggtaagaaagagattgatttaactctctcacaattttctatacttttcttggttgcctgtcatagataaaaacattttatcttgatatttagtcatcctttagcctatagagtgaagatgtagaaataatactggtaaaactaaagacaggagatttaaaatatgaaaagaaaatggattaagaaaaacaaagaccaaaaaaagttctatatacaagtactattttgtatacctagtctgatataagaacctattttgagatacaaccatatctctttttaaaaacaatttttaaagaaaaatttaaaatattttatgtctatagcagaaaatttagaaactataatttctcatattaaaaaactataattttttcatataaaaaatgaaaaaaaaatagcctgggcactgtagctcactcctgtgatcccagcactttcggaggccgaggctggaggattgcttcagcccaggagtttgagaccagcctgggcaacatagtgagaccttgtctctacgaaaaataaaaacaataacaaaattggccaggcctggtggcatgtgtctgtagtgccagacttgggaggctgacatgggaagagcacttcagcctgcgatgtgagctgtgattgtgccacggcaatttagcctaggtgaataagtgagaccttggtaaaaaaaaaaaaaaaaagaaaagaaaaaaatgaattttcctcagcaccacatcacacttactccaaaattgaccacatagttggaagtaaagcactcctcagcaaatgtaaaagagcagaaattataacaaaccgtctctcaggccacagtgcaatcaaactagaactcaggattaagaaactcactcaaaaccgctcaactacatggaaactgaacaacctgctcctgaatgactactgggtacataacgaaatgaaggcagaaatgaagatggtctttgaaaccaataagaacaaagacacaacataccagaatgtctgggacacatttaaagcagtgtgtagagggaaatttatagcattaaatgcccataagagaaagcaggaaagatctaaaattgacaccctaacatcacaattaaaagaaccagagaagcaagagcaaacacattcaaaagctagcagaaggcaagaaataactgagatcagagcagaactgaaggagatagagacacaaaaaacccttccaaaaaatcaatgaatccaggaggtggttttttgagaagatcaacaaaattgttagaccgctagcaagactaataaagaagaaaagagagaagaatcaaatagacacaataaaaaatggtaaaggggatatcaccaccgatcccacagaaatacaaactaccatcagagaatactataaacacgtctacgcaaataaactagaaaacctagaagaaatggataaattcccggacaaatacaccctcccaagactaaaccatgaagaagttgaatccctgaatagaccaataacaggctctgaaactgaggcaataattaatagcctaccaaccaaaaaaagtccaggaccagatggattcacagccgaattctaccagaggtataaggaggagttggtaccattccttgtgaaactattccagtccatagaaaaagagggaatcctcccaaactcattttatgagcccagcatcatcctgataccaaaacctggcagagacacaacaaaaaaagagaattttagaccaatatccctgatgaacatcggtgtaaaaatcctcaataaaataccggcaaaccgaatccagcagcacatcaaaaagcttatccaccatgaccaagtgggcttcatccctgggatgcaatgctggttcaacatactcaaatcagtaaacgtaatgcagcatgtaaacagaaccaatgacaaaaaccacatgattatctcaatagatgcagaaaaggcctttgacaaaattcagcagcccttcatgctaaaaactctcaataaatttggtattgacgggatgtatctcaaaataataagagctatttatgacaaacccacagccagtatcatactgaatgggcaaaaactggaagcattccccttgaaaactggcacaagacagagatgccctctctcaccactcctattcaacatagtgttggaagtcctggccagggcaatcaggcaggagatagaaataaagggtattcagttaggaaaagaggaagtcaaactgtccctgtttgcagatgatatgattgtatatttagaaaaccccatcgtctcagctcaaaatctccttgagctgataagcaacttcagcaaagtctcaggatacaaaatcaatgtgcaaaatcacaagcattcttctacaccagtaatagagagccaaatcatgagtgaactcccattcacaatagcttcaaagagaatacaacacctaggaatccaacttacaagggatgtgaaggacctcttcaaggagaactacaaaccactgctcaacgaaataaaagaggatgcaaacaaagggaagaacattccatgctcgtggatagaaagaatcaatatcgtgaaaatggccatactgcccaaggtaatttatagattcagtgccatccccatcaagctaccaatgactttcttcacagaattggaaaaaaaacttactttaaaattcatatggaaccaaaaaagaacccacatttccaagacaatcctaagtaaaaagaacaaagctggaggcatcatgctacctgacttgaaactaacaaggatacagtaaccaaaacagcatggtactggtaccaaaacaggtatatagaccgatggaatagaacagagccctcagaaataataccgcacatctacaaccatctgatctttgacaaacctgacacaaacaagaaatggtgaaaggattccctatttaataaatggtgctgggaaaattggctagccataagtagaaagctgaaactggatcccttccttacaccttatacaaaaattaattcacgatggattaaagacttaaatgttagacccaaaaccttaaaaaccctggaagaaaacctagtcagtaccattcaagacataggcatgggcaaggacttcatgtctaaaacaccaaaagcaatgtcaacaaaagccaaaattgacaaatgggatctaattaaagagcttctgtacagcaaaagaaactaccatcagagtgaacaggcaacctacagaatgggagaaaatttttgcaatctagtcatctgacaaagggctaatatccagaacctacagagaactcaaacaaatttacaagaacaaaacaaccctatcagaaagtgggtgaaagatatgaacaaacacatctcaaaagaagacatttatgcagccaacagacacatgaaaaaatgctcatcatcactggccatcagagaaatgcaaatcaaaaccacaatgagataccatctcacaccagttagaatggcaatcattaaaaagtcaggaaacaacaggtgctggagagggtgtggagaaataggaacacttttacactgttggtgggactgtaaactagttcaaccattgtggaagacagtgtggccattcctcaaggatctagaactggaaataccgtttgacccagccatcccattactggatatatagccaaaggattataaatcatgttgctataaagacacatgctcacgtatgtttattggggcactgttcacaatagcaaagacttggaaccaacccaaatgtccatcagcgatagactggttaaagaaaatgtggcacatatataccatggaatactatgcagccataaaaaaggatgagttcatgtcctttgtagggacatggatgaagctggaaaccatcattctcagcaaactattgcaaggacataaaaccaaacaccacatattctcactcataggtgggaattgaataatgagaacacttggacacaggaaggggagcatcacacaccagggcctgtcatggtgtggggggagtggggagggatagcattaggagatatacctaatgtaaatgacgagttgatgggtgcagcacactaacatgacacatatatacatacgtaacaaacctgcacgttgtgcacatgtaccctagaacttaaagtattaaaaagaaaaaattaattttcaaaaaacaaaaatatgcttaatttttccatcttaataatcttccttatacatgtgtatatacatccatttgggatcatgctctgtattctttagttagcattttattgtgtctttctggagttgatggaggtagtcatgagtgtgtctgtgagcccggtggaatgctcacgcctgtaatctcagccactcggtagtctgagatgagaggatcacgtggggccaggagttcaagaccagcctcggcaacataggaaggcgctgtctctacaaaaactaaaaaattaactgggcatgatggtatgtgcctatagtcccagctacttgggaggctgaggcaggaggatcacttgagcccaagagttcaaggctatagtgagctatgatcacaccactgtactaccgccaggacaacaaaatgaggctgtgtctcttacacacacacacacacacacacacacacacacacacacacacacacagtggttggataggatgagggcaatgaatttcttgaattgtttttttctgaaacatgactaaaaatgctataacctagtttggtgatttgtagataaagtaggatttttaaaatcacttttctatataattgtgctgaggaatgaaattggctttgattggattaaatatctgccttctaaccaaaacatagtctagtagttttaattcaattatttattccatgtgtcataatgccccaaataaccaggccactgctactggcattaagggttgccagcaccatgtggaataatatacaaatgcaaggtgaaaggaatttctgcaccatttaaattttttcctttctcttaaagcagagcaaaatttttgcatctagtaaatgaatgttatgagaacttaattttgagaaaaggcaagctttattgaattataaattgtagtgtgcatttgagtaaggtgtacaacgtgatttgatacatgtatacattgtgaaggattaccacaatcaagctaattaacacatccatcacctcacatagttaccactttttttgtttgtcgttagaacccttaagacctgctcttagcaaatttcaagtgtactgtaccgtattattaattatagactaccatgctatacactgaatcttcagaacttactcatctcatataactgaaggtttgtgcccttcgacacaaacatcttccatgatctccccctttcccagccctctagaaaccaccattctactctgtgtgagttctgtgagtttgatgtttttaggttcattcatgtcacaagtggcagtatttcccttttgtttttctgagacagagtctcactttgtcacccaggctggagtgcagtggcgcaatctcagctcactgcagcctctgcctcccgagctcaagcaatttttgtgcgtcaactcttgagtagctgggattgctggagtgtaccaccatgtctggctaattttcctatttttagtagagatgggatttcgccatgttggccaggctggcctcaaacttctggcctcaagtgatccacccgcctcggcttcccaaagtgctgggattacaggcatgagcaacagtgcctggcctcctttttgttttatggctgataaatattccatttgattatatatgccacattttctttatccattcatccgatgcacacttacgttgttttcacagtttggctgtcgtgacaatactgcagtgatcatgggagtgctgatgtctttcttgagatcctgatttcagtgtttttgatacgtagcagaagtgacattcctgagtcacacggtagttctgtttttaatgtttagaggaaccttcttactgttttccataatggctgtaccagtttacattcccaccaatgtaatgtgtatcaggattctcttttctccacatccttgccaatacttgttatcttttgtctttttcaattggtgtgccatttagttctttttcttgcctaattgactagaacttggaacattctgttaaagagaggtggtgagagtggactcccttttcttgttcctggtgttaggggaaaagctttgaacttttcaccattaggtatattggctgtggactgatcatatatggcctttattgttgtgttgaggtacattcctcctttacctaatttattgagagtctttgtcatgaaaggatatttaattttgtcaaatactttttcagatgattgtgtgatttttatccttcattctgttagtttggtatatgacatttattaatttatatattttgaactatccttgcaaataccacttgattatagtgaatgatccttttaatgtgctgttgaattcagtttcctagtattttgatgaaacttttgcatctagtttcatcgggaatattgacctgtaattttcttttcttatagtatccttatctggccttggtatgagggcaatactgggcttttaaaatgagtttggaagtgttcctgcctctttaactctttggatgaatttgagaagaattgatactaatttgtgctcaggtgtttggtggaaatcacccctgaagccatctggtcctcagcttttctttgttgggaggtttttgactacgctttagtcttcttacttgtttttggtctgttcagctattaatatttcttcacttgtccaggtacagtggcttatacctgtaatcccagcactttgggaagccaaggtgggaagatcacttgaggcaggagttggagactagactgggcaacatagcaagacctcgtctctacaaaaaataaaaaattaactagttgcagtggtgcatgcctgtagttgtagcaacttgagagactgaggcgggaggatcccttgaccccggaattttgatgagctatgatggtgccactgtgctccagcctggacaacaaagcaagattgaatctcttttaaaaaagtcttgatttatttttgtttgttttagtgtttcagtcttgttagggtacatgtttctagaaattaatctatttcttcttggttatccaagttgttggtgtattaattttcataatgttctccttgtatttctgtggatcagttgtaatgtcttctctttcatgtctgattttctttatttgaattctctttcttagttattctagctcgaagcttgtcagttttgattatcttttggcaaacaactattatgttgattttttaaaattttctttctggtctctcatttatttcttctctttattatttccttcctttagctaactttgggcttagtttgttcttttttctatttttttgaggtataaagttaggttgtttgagatcttttttttcttaaagtttattgccgtaaacttgtcttttttaactactttgctgtattctataggttttagaatgttgtgttttcattttatttgcctgaagatactttttgactctctttttttttttgagttggactctcactctgtcgcccaggctagagtgcaatggcacagtcttggctcattgcaacctctgcctcccaggttcaaacgattctcctgcctcatcctcctgaatagctggaattacaggcatatgctaccacacccggctagttcttagtatagatggggtttcaccatgttggccaggctggtctcaaacccctgacctcaagtgatccacccacctcgatctcccaaagtgctgggattataggcgtgagccactgcgccgggcctgactttctccttttgatttcttctttgacacattggttttgtctagagtatattgttcactttccatgtatttgtgaatttttaaatttctctcctattattgatttctaattttatactattgtagttggaaaacatacttgataggatgttaacatagttggatttaacacttaatttggtggcctgacatatgatatattctggggaatgctgtgtgtgtgcttgagaaggatatgtcttctgctgctgttggatggatgtttcagagagtctgttacttgctctgtaactcttattcaggtctgacgttttcttactgatagactgtttgacctatccattgttagaagtggggtaataaagtcctctcttgttattgtattgctgtctgtttctcccttcagttctgttagtatttgctttatatttttaggtgctctaaggtggggtgcaaatatactaatacatttacaactgtaatattctcttgatgaattgacccgtttattgctgtatgataaccttctttgtctcttgagactgaaagtatattgtgtctgatataagtaagcccatttctattcttttttgattaccatttccatggaatatctttttctatccttttattttcagcctgtgtgtgtccttagagctaaagtgagtctcttgtaggcaacatattgttggatacttaaaaaaaatgttagtcactctctatcttttgattggagaatttaatccatttaaagtaattattgatagttaaggccattttattctctgttttgtaggtcctttgttcctttctctcttgccgccttcctttgtgatttgatgatttttttttgtaatggtatgattaattcctttctatcttttatatgttactggaggttagttttctttgtggttaccataagggttacataagacatcttataacaggctgttttataataactataattacctacaaaaattctacaattttacttctccctctttcatagtttatgctattgatgtcacactttacatctttttatatttgtgtatccattgacaaattattgtagctgtagttgtttttataattttgtcttttaacttttatactagttaaaattgatttatgtacctcgattgcagcattacagtattctgaatttgactgtatatttatttttaccagtgagttttatactttaatgtgttttcatgtttttatttactgtcctttagtttcaactcaaagaactccctttagcatttcttataaggcgggtctagtgcgatgaactccctcagcttttgttggtctggaaatatctttatctcatctttttttctgaaggacaacttttgttttttgttttttgtttttttccatctgatggcacctctgactccttgacattgtattatttgtttctcagagaagtaaagcaattttttttttcttttgagacggaatctcgctctgttgcccaggcaggagtgcggtggcgtgttctcagctcactgcaatctccgcctcctgtattccagcgattctcctgcctcagcctccccagtagctgggactacaggtgcgtgccaccacgcccggctaattttttgtagtttagtagagatagggtttcactgtgttagccaggatggtctcgatctcctgaccttgtgatccacccacttcggcctcctaaagtgctgggtttacaggcgtgagccaccgcacccagcaacaactttcttacgtataatattcttggctggcaattttttatctattagcactttgactatatcatctcattccctcctgatctgcaaggtttcggctgagaaatgcactgattgccttattgatggtggtaatggtggtgtgtgtgtgtgttgggggtttccttgtattatataggttgcttttctcctgctgctttcaaaatttcctctttgcctttgatttttcggaattcaattataatgtgtttcagtgtaattttctttgacttgagcttttgagcttcatgaatctagatgtccatatttctttcaagatttgagaagttctcagggaacaaacattcatttaagtaagctagatatttcttctgttctccttttgggaccttgataatgcacatattcattcatttgatggtgcatcatagtttctgtatgcttttgtcatttttaattcatttttctctttagtttctctggataattttaaacaatgtgtgtttgagttcagtgatgctttcttctgcataactgggtttcctgttgaagctattaatttttttttttagttgtcagtgtattcttcagtttcaggatttctgtttggttcttttagagtttctattcctttattaaactatttgttttgttcatgtattgttttcctgatttttgttgagtttcctgatttttgtttctgggttctcttgaatctcattgaggctctttaggatgataatctttaattctatcagtcatttcatgaatctccattcctttgtgatcagtcataaggactttattggtttactttggtgatgtattatataattgtaaaccgaatatatagaaaaccgaaaaaaaaatctgtagaaaaataattagaattagcaagagcatttaacaggttttctagatataatacccatatatgggaatcatattcctatttatatgccagcaaaaagccactagaaaatgtaattttaaaaagttattaaaatgatttatttgggaaaagttcattagcgcatcgagtcattaggtggaaggttgagaaaaggtgaactctacacgcagaagagactaggctgtcactgccttgacgcactggttaatcttagcctctttaagagtgagaaaaccaaggaccaggcacagtggctcatgcctgtaatcccagcactttgggaggccaaggcgggtgggtcacttgaggccaggagtttgagaccagcttggcccacatggtgaaaccccttctctactaaaaatacaaaaattagccaggcgtggtgttgcttgtctataatcccagctacttgggaggccgaagcaccagaatggcttgaacccgagagtggaggttgcagtgagccaacattgtacctttgcactccagcctgggcaacagaatgagaccttgtctcaaaaaaaaaaagagctagaaaaccagacattatattatatgctctcagatgtgaggcaatgtcagttacacaacaccattaattattatttttacctaaaaatgaaaattgaatatattcaagtctgtaaagctaatattcagtatcagcacaaacaaaaagcaagagatacagagaaacaagttgaattttatcatgaagaagcaaacatacaatccagaatgtgagtcattgtgtggaataatggatttcctttaaaaaaaaaatcactggcattcaaaaagtgtacattggaggaggtaagagacttttctctagattagtaggggatgaaaggatctaacaaataagtacaaagtatgggcacttttgtattttgattcaaataaagtagctgtaaaaactaaactttgatacgaatggggaaatttgaatatgggctatattgatatcgagaaattagttaattttgttacagtttacattgttgagaagtgctcttttttggagatgcataaggaagcatgtataaggatgtaatgacatgatgtatggaattttaaatgatgacaaaacgtataatgtacataggaataaaatatatacacatctttcatggaggaaaatataacgctttgttagaagccttttaaggagacctaaagaaatagataaacacactgacaagttttcgacttaacaataatgcaaaagtgatacacattcagtaaaaccatactttgaattttgatctttttctgtggtatgtagtatgatactgtcttgtgatgctgggcagtggtagtgagccacagatcccagttagtcacacaaccagagagtaaacaactgatattttccagattaggtgctttaaatgcattttgaacttaggatattttcaacttatggtgggtttattgggatatagcccaatggtaagttgaggagcatctgtagtatgttaatgaattgaaagatccaaaagcatgaagtttttcccaaactgatattgcttcagtgtaattggaatcaaaatcccagaggctgctgttgggttttttgttgctgtggttggttggttggtttggtggaacttgactggctagttctgaaatttctatgagaagcgtaaagcgccaagaatagcgaagacaggtttgaagaaggaaaaggtagggagccttgccttactaattacttcttgtaaaggtatagtaattaaggtggtataggtctggcacagaaatatacaaacatagccacaaaacaggtacacatgtatatagaaactttgtacatggcaatgcatgtaaatattcctgggaaaattcattctaaatacttgtaaaagaaagaaattttattcttatcttataccagacccctcaaaatagaagtatgttcttacctcataatatatacaacgtcggtttcagatggattaatgactacaacgtgaaagacaaagttaacgtcgttttaggggaatatctttatgaacttgggatggacaagattgtgtggaaatgtcacagaattgtatattgtaaaggagaagattgatacatttgaaacaattaaaaattttaagctggacatggtgactcatgtctgtaatcccagcacttggaggtggaagccagtggattgcttgagtccaggagttcaagaccagcataggcaacttagcgaaacctcgtctctactaaaaattagcggggtgtggtggcacgtgtgtgtaattccagctattcaggaggctgaggtgggagaatcacctgagcctgggaggtcaaggctgcagtgagctgagattgtgccactgcacactagccttagcaactgagagcccatctcaaaaaaaaaataaaaaattgaattctgtcaatgaaaagatgtaaagatatcatagactagaagaaaatacttatataacatataacagacggataaagtattattatctataatgtataaagaatacctacaagtcattaagaaaaagataccttaattttaaaaatgtacaaaagacacaaataactatttcacaaaagtggaaacaggaatgaccaaaaactgtataagatatttagccaaggtggttaaatgcatttgacatgcattttaaaagtataatgaagtactatttttttttatacccgattggaaacatttagaaagtaccatgtgttaatggatgtgaagagttataatggccactgttaagcacagctagcaagagtataaattaatatagcttcttggaaaataaaataaggtatacctactgtatttcctagcaatttagttcctaggcctataccttagagatctccttgcgcaggtaaatcagagtgcacctagcagcgttatttaaaatagcaagaaaatggaaacaacccagttgtgatctttgggggagtggattaaaataattgccatgtattatttcacacctcagtgaaagtggagaggattaaaagatacattacactctgaatggtctaagtctcgaaacctattgaaagggaataatactgaatatcattctgtactaaaaagaaaaaggaataattatttatctttataaagctcaaaaacatgtaagctataaatgaacagctcatatatatatatgtagcaaaacaataataaaagcaaggggattttaaacataaatgtcgagatataggttgttcttattaatggaggatagaccaatagtagagagaggcacaacagggagcttcagaagtgaatataatgttccatttcttaagctaggtttctagatttttatgtcgttattttcatctacatctacattatatacagtgtattgcatgtttgaaatgtttaataatggtaacattagagttgttttacaaaactttctttttctatcagccattctaacatttccgtgcatcgatgtcaggagactgcttccctgtttccaaaatctctgacttggtttctttttagtcatttcagattatcccatgcctttcttttgttttatgctttcattgttcttcatagagtacatgctgaaatacatgttctttatgggaaaacttatttttgtaaacaaatatgctcccgctgacaggaaagaatttggaattgtggaaaaattttacagtatatatttatttgttgtttttcaatgactccttattgtcactggtgtaagtctctaaataaacatattgtttctatgcatgcatatgcaaagcttgattcttctccttctgtcattaggcaagtgaaagaccagaataagaaggtagcaaatctgaagcacaaggaacaggtggaaaaaaagaagagtgcacaaatgctggaggaggctcggcgacgggaggacaacctcaacgacagctctcagcagctccaggttagaacacaaggagaaccggaaaggatggggtgaagagatttgatccatcatcgcatgttgttttcctcttcatctttatcctcctcttttttctctttctaaccctgcttgctgccttcctctcagaccaactgtttagcaatgaaggaatggctttaaatagaaaatgcaagttttattccacagctttatgaggtcacctcagcataggagaaagttcatcttgcttcaagttgatgacacgtaattggtaagttcaatgacagtttaatgagtgggttatattaggcttcagggttgtcagtgtacttctctgccagttccgtccattacaatggattgctaatcttagtttgtgtctttcttccttttttccattcttcctcttttccttctaacctccctctatctttccttcctttcctctttttaaatattcaatttagcaagaatattttacagtcatacagaatgtgacatataaactgtattttttcacttcagtggagtgatcattgatgcctaaacctaattattcacagattaattaaaccaggctcaataacagcagtagcagctatcatatcataagtgccagttaggtcctcagtatttgaaactaggctctggtcattggttttgttctaaccttcacagtaatccaagtggagcaggtggtattgtatacattttgcaccggggaaaatggattcagagacattgcgttacgtacataaacgcacacaacttccgaatggctcagccatgattttaactgggacttcctgaatctgtggactgtcctctttgtcttgatcataatgcttcagaatgcaggtttagattatagggaagaataccgtagacgcgctggagtctctgaaactcatgctgagtctaagccactgccagattgtttttctctagttaacagtttctgattgggtctgatactgtgtatgtgccacaattacaatctttactggagagattcggaggagttactatgcagaagccattttgaggctttacagcaaattcatttaacatatgaagaagactctactttttacttatttttctcattcctcttttatgtaacttttactgattatatttatagaaaaagtctaaaatttcctcaaatgcaccaaattttgaaaaaagcagcacaccagtttttcctcatccttgccaataagttaatattggcagttttctcctctttctgttattcctccttttttttggttaacaaaatacaaatctgatgagtggaaaatatttcattttgtgttaatttacatttctctgattaccagtgacattgttttttcaagtgttgaattttcttttgtttgttaatgtaatttaaatctctcttccattgttagcttttcctcccataaatgttttgcttagttcatccccattttgagagtatgtatttacacataaatacttgtaagttgttctgtgctttcgtatttttacctttactttttaattcattttatggtatttgtgtggtgaggatattttttctttattgctaacaacttcactagaatgtttatagggaattatttcattgctcacaaacttgaattgatgtctttatattttatgaaattgatgattagtctgtttctaggatttcagtttaaccttcgttcttgaactatggccacattgttgtttaattgtagaaaatatttattttatgataaggcaagcccctctttatgttaacgccttaactgtttcatttatcttcccctctcatcatttaatgttttctgttagcaatctgtctttatgaaccaaaaatactcttctaatcttctgtcagttgttttaacaccaaaagtgctttcatatgtaatctcttatttcctttttatataaactaaaagataaataagatagattatattatttatattttacatataaggaaaactaatttagagtggatgactgacttccccaaattgtctaagtaaatgataagtatcaaagttatgaaaaagataactgatggccatgtgcaagttacacagagatgtaattcattcaaataccgtgaaaagagcactggactacaagttaggatacttaggatctgatctcagttcttttactaactactcagttacttaagtatatttctgtttatttatttatttacttattttacagacagtctcactctgtcacctaggctggaggacagttgtgtgatcctcctgtctcagcctgccgagtagctgggactgcagacctgtaatttttaaattttttgtagagaccaggtctcactatgttgccttacgctgttctccaactcctggctccacacaaacctcctgcgtcagcctgccaaagtgctaggattatagacgtgatccactgtgcctggccccgttaatcatatttagagatcacaatctgggtattaggggtactccctaccactggattgtcatttacaacaacataattaagaaatacagccgggcattgtggcttatgctaatcctagcgactcaggaggtgagggatggaggatcacttgagactaggagttcaagaccaacctgagcaacatagtgagaccctgtctctaaaaaaatttaagaaattagcctggcaggatggtgtacctgtacggtccaagttactttagaggctgaggctggagaattgctttatccgaggagttcagggttgcagtgagctatgattgtgccactgtactccagcatatgtgacaggacaaaaccctgtctctgaaataaattaaataaaaataaaagaagttaggaattcttggagaaattactcattccaggattagagcaagaaatgtacgggataaacctaaattagtagttctcaaacatgtgtgcattggagttccatggagggctgttacagattgctgtctcctatccctaggggttttgattcagtaagtttggggaaagccccgggaatttgcatttctaataagttcctgggtgacgataacattcctggacgaggaaccacattttgaaaaatcactgccctatagcatcatgtgatacgaaaaattgagaacctgtcaaagactgctggggtcatgtaaggatggacacaggagcaagaatgaaggggctttcattggcctaggacagacagctggagcataagaaagactgatgagtaagttgtttaaaacaaagtatttttaaatctggcaacttcacgatgagactctaaaagtactttggagattgctggggcaccagtgccctaacactgggatttgctttttaaaattccagtggtagtaggggaagcgttggccattttttgataggttattgaagctgagtgacggtgacatggggtttatgatattatcttccctatacttttgcatgtttgaaattgtccctaataaaatgctgaaaaagaaagatatcacttaaccacttgaaactttcatatctctaaaatgagtcttaagagagatgagacttcactccttagactttagtgtgcctttcagttctgaactagctttttaaccatatttacatagccctggaatggagcctttgactctggcttcatttctttttctttttttttttttttttgagacggagtctcgctctgtcacccaggctggagtgcagtggccggatctcagctcactgcaagctccgcctcccgggttcacgccattctcctgcctcagcctcccgagtagctgggactacaggcgcccgccaccttgcctggctagttttttgtattttttagtagagacggggtttcaccgtgttaaccaggatggtctcgatctcccgacctcgtgatccgcccgtctcggcctcccaaagtgctgggattacaggcttgagccaccgtgcccggccgactctggcttcatttcttagccaaactccttatttgtgttttccctttacttgagaaatatttcctatattttccaagtaacttcttttttcatatctttgcttgaatttcatggagttggtttcttctgtttttaaactgaaggtcatataccttggcttttgtttaaaaattataacttttaattaacgtactagaaaaataattaatccataatatttattgtttacatcccgctacattttcttttaaactttaattttacttacttgtaatactaatacatatatacactcttttgtattttgctttttaaaaactttttatcgtttaagcatttccgtgagttatatgttttatattgatgcttgtactactattctcagctgactccagagttcagtagctttacacacgttcctctttttctggacattacctaattttcagttttcaccgagcaaatttgtacagatgaattgtacccaatttggtgatttccgttggtgatttctcagagcaaacttaaagtatatgaagtgttgtagcttttcttaaatttctgttaccaaagatgagctaatttagagaacccccagcagtttgcaggcgttctgttttccccatagccacttcggttctatttaattttctgctcattttacacatgtataatggcgtcttcaagttgtcatatttcatttcttcagtgacactgtccgtttttcacatgtaatgatttattatctgaaatttccgtgtcacattttaattacatttgctacctatcatgaagatctttgcatatcacctactttggattgctgtgttataaatgacattgaggaatgatgattgttgcgtattttttctctttcagtcatctttcttttgaaatttatgattgtgttgtttaaacctcttttcaaaaaaaatcttttaaattgcttaccttgtcctttctaggctgtttcttcacttaatctcccatttgcaacacagttaaacttattagtttctttgagttctttagctgtgtgtatgtgtttgtttcttgtaagtgttcattgctttaatgcatatggagtttattttatatatcttataaaacataaatttaaagtactctttctttaccctgatacccagttctcctggtagcacttagtaaataggtattctttaaaaaatttttttaaatctacttaatcatatgctagataatcacatagaagtttccatttcattctagattcattgttttgtctttaatccaatttttttttttttttttaaacggagtctcttttgccctgtccccaagcctggagtgcagtggtgtgatctcagctcgctgcagccttcacctcctgggttcaagtgattcttctgcctcagcctcccaagaagctgggattacacacctggctaatttttttgtatttttagtagagatggagtttcaccatgttgaccaggctggtcttgaactcctgacctcaggtcatccaccagccttggcctcccaaagtgctgggattacaggcgtgggcccagcctttctgcatttcttttgcactttgtttacaaagtcagtagatcatcttcaacatcattaactttatctccaaactttttttctaggtaaatttaccagttttttcaacaagctttgaaatatcatttgagtctctttagtttgttaaaataacttaaagaatattatcacttgtaatttattcagtcatctgtagccaggaactaaattcattccttttttttattcctatctatgtttattatttatcatgttaaagatttaaggaatataaaatattttctaaagaaagctaatatccagattacaaccaaattattaaagatttctggtaaatcatagagaagaaaagagcaaatgaaacttcaaggcataaaatagttgaaaaaagtattagcaaatgctctttattgtatttgcctataaaataatgtttctccggatgaaaactgagacaaattccttacagagctcctgtctctaaaggttgtgagcattaatgagatgacacatgtaaaagcttctgtaagagcaaatgttaacaggactggactaggtagtagtagcataacaggtacagtgggccctccatacccatactcagccaatggtggattgacaatattatggaaaaaaccaccaataaaacagaataataaaacaataaaatataaaataatataccagctgtttacatagtgtttacactgtattgggtatgagaagaaatcaagagatgatttaaattatatgcgaagatgtgcatagattatctgcaaatacgataacattttatatcagggacttgagcatctgtggatttttatattccaggggagttttagaaccaatccccagaagatactgaggtgctactgtagggatgtaatgaaacgtgagagattctagaattttcctataaaaggaggcattcacttcattaggagggaacttttaatttttccagtagaattttgtgagaaatttgcctcatgttacttcatttcgagcagtggttctcaaggctcaattttggccctaaggagtatttggcactgtctggggacgtttgcaacttgagaggtgctgctgtcacctagtgagcagagtgctgggatgctgctaaatatcctgtagtttgctggatagcccccacagcaaagagttattcggcccacactgcaaatagtgctgagtttgaaaccacatttagaagcactttgaacaccagttctttatccagagtgttactgtggatgaagttttcatgattagctttggaaacctaatacgtatggccatatttatatttttttctatgtagagctaagaccagtgctattaagttaaaactctgtagtggcagtgccacagtaccaaataatattgccccggtacatagttttctggtaccatacgctaatgtgatgtgaaataacgctaggagcgttgtggtgagtgagtaatttacataacatacacattaacatcattctcaggcacataattccagattgaagttagcataccatgtgattgaagtattctgtattactgtgaaagaagacttggtgctctagaactatttaatatttgtcacaccaaagttgtaatcgaatgactttggttatatttggtgtgtcatagaatagtagaatagcaattaattctgtcttcttcttttaaacatttttatcacaatgttttgtgttttaaatttctggctatttaggtgatctgttgatgttttcatgaaataggagaagtaaagggaaacattactaccttatttctgttttttgaaggaattattttagtatttctatcttaagtataataattctgggattaaaatatttattaagtgttttatacttaatggttgttggtttattttattttattttatttttctttttagagagggtcttcctctgtcacccaggaaggaatgcagtggtgtgatctcagctcactgcagcctctttctaccaggttcaagtgattctcatgcctcagccacccgagtagctgggattccaggcatgtgccactatgcctggctaattttgtgtgtttttattagagatggggtttcaccatgttgaccaggctggtcctggcatcatgtgatctgcctgcctcggccaccagaagtgctgggattacaggcatgagccagcacacctggccctgtacttaatgtgtttgtttgttttgagacggaatctcgctctgttgcccaggctggggtgcagtggcgcaatcttggctcactgcaagctccgcctctgggttcacgccattctcctgcctcagcctccctagtagctgggactacaggcacccgccaccacgcccggctaattttttgtatttttagtagagacggggtttcactgtgttagccaggatggtctcgatctcctgacctcgtggtccgcccgccttatatattttgtacttcaataaatggaattatatttattctttttcacttcttttgttgattatgatttgtgagattcatttgtattagttatatgtatcatccacacctttattgtccttgtactgtgttttttatttaattcagaattccacatttatattgaaagtcttctgaaaagacaacttcatttcttttcaattttccattctttgaatacttcagatggtaccaagagtaattccttttgacagaaagtgagtttggaagtaagtggttactttgctgtttgtttgtttttggttcaacacattaatcatgttctgattagattaaacactgtcttacatgtggaatgaaaatgatacctaaaaaattgagagaatctgaggatcccagagattctaaacacctttttgtcatttatcatggccttcaatgtgaatactcttccttatgatgtcacattgccactgagttgtatcctatttgtacctttgtgttttggacagttagttactgtgatttgtagtgacttatttcacagtttttggtctcaaaagcctctttatatttaaatattattaaagttcccaaagtgattttttttttctttttttaaatagagactgagtcttactgtgttgcccaggctggtctcgaactcctggcctcaagtgatcctcccacctttgcctcccaggatgctgggatgataggcatgagtcactgcaccaggcctcaaagtgatttttttatatgggttatatatgatatacatgtgtagatctttagaggcagctatcccatgtctagatttatatgcatatacatgtccaaaaatataaaaatacatatgtacaaggtgacttacaacattattcctaattgcaaaattttgaaaacctaattgcctataggtaggagagtgcttaaattcatcgtggtgaatctacacaagagactggcagttttaaaaaagaaatgaaatgtgtgagcaaaaaaagatagtattttaatcgtagaataaaatatatatccatgagtttatgctgatataaacaagtaatcaaatacataaataaatggcatatggacagacggctctttctcatagaagaatttcaattaataagtatagatgggaataaaccaaaagaaaatcaccatgagacaaactgatggttgtgaaaattagtgtgtgaaagtttgaggttaaacatgactttcatagtctcaaaatgttttccccaaggtgtttgtttattttaacagaagactgtaacttttcagtgaagaaacctaccaggccaccttaacaaagtgtttagagttaacattaccagtaatacagagacatgaacctcccgaaccccttgatacaaggcactgagagggacacagtatcatttctgtggtattctctctgaaaatgtgtaacctcattccaataatgagaacatgccacacagacgcaaattctgggacattttacaaaataactgagcagtacactttaaatatgtcaagatgatgaaagacaaggaaagactgagcagttacagatggatttgaggggaaatgtcagctaaatgaattgtggggtcttggactaaagcagatttcaggaaagggaacagagaattggctgggtatagtggtgcatacctgtagtcccagctactgggaggctgaagagggatggctgggtatagtggtgcgtacctgtagtcccagctacttgggaggctgaagagggagaatcacttcagcccaggagtttgaggttgcagtgagccctgtttggaccactgcacttcagcctacaggacagagtgagaccctaagaaaaaaaaaaatccagaaagaaaggacactggtggaaaaacaatgaaagtaaggttcgcaggtgggtaaatagcattgaaccaatgttaatttcctagttttgatcattttactatagttttgtaagctgttaacattacaggagcctgaataaggagtagatgggcactgttctgtttttgcagcttttctgtatgtctgtaattcgttcagaataaaagttttatttaaaaaatgtattgacactctatttctcagcacttttaatcacccacttcactttgccatccctttgaaataagtacgcttttgaatttaaagatggcttactaccaaaattaacgttacagggtagttagctcaggcatttttcctcaacttaggaatgcagatattatgttctcatattgttgacttcctaaacccatagtttaattaagaatgtagctgatcaggctgggcacagtggctcatatctgtaatcccagcactttgggaggccgaggctggcggatcacctgaggttgggaattcaagaccagcctgaccaacatggggaaacgccgtctctactaaaaatacaacattagccgggcgtggtggcacatgcctgtaatcccagctactcgggaggctgaggcaggagaattccttgaacctgggaggtggaggttgcggtgagccgagatcatgccacttcactgtagcctgggcaacaagagcaaaactccatctcaaaaaaggaaaaataaaaaagatgtagctaataaagttgatcattctaaagatttgactcaaatcctcaagccatgatgatgtaatatggctattatcagtagagttatacctaggcctagagatgaaccttgacctgtctgtatccttcaagtatagaaggtttaattttactcatttttagacatacttgagatgtctttcattttttcaatataaatttatcgaatgctttctaagtgtcgggcactgttgctaatctttggttatacagtggtgaaaagacatgttctctgcccttctggaacattgtctcatggaaaaacaataaaactaaacaaataagtaaatatcaaccagggtaagtactacaaagaaataaacaggaccctgtgatagatgatgggggagggagatgttttggacgacaaatttaggtagtgacatcagaggagtcctcccaaaggatatgacattgagatctgaaaaagccatataaaaagtggagaaaacagtttttaaaattgaggttatccatacggcagtgaaaagcttggcattttcaaagtagagaataggtaaggattaggtcaaaagggaccttagaggccatgaaaagttatttagattttacaagcagtgaaacattctacgcgaaaagttgacaggatctgatttgcattttcaggatactgttttttgcaatatttggagaatgattggagtaggacaagagtcatacagagagtgtttgctcactatttcatgcctttttgtgctgggcagttttctatgctagaaataatgttgcacaagacaagcttcatactctcaagaagctcacattctggtaagggctctgtgagagtggtggagagcggtttttatttatattaaaaaaaatttttttttagagacagtctcgctctgtcgctcaggctagagtgcagtggcatgatcatagttcactgcagcctcacactcctggacttaagcaattctcctgcctcagcctctggagtagctgggactgtaggggtgtgccaccatacctggctaattttttttttttttcttattttaagtagagactgagtcttgctatgttgcccaggctggacttgaactccaggcctcaagcagtccttctgccttggcctccaaaatgcatggattatactttacattacttactacaacttttcatttctgctgaatgtcaaaagatgtgttataatacaagtacagtaattttaattatagtaattgctgtacacagaactgaaattaggtaaattccagcaacagcaagaacctttaaagcgtagagaagcctagtcttagctgatttgactgttggtgatttggggattaaaaaaagctttctcttgaaagcctacccatcttttaagggtcagatgctttttcttgtgaagctgcttaaatcctcacagttggaattaatcataccttccgttgtaatttcattcgtttgtgtctgcattgattttgggatttattttatattactttgtattatatactacttgtgtgctggttcctccacatacttgagcttgggaatcatgtcttggtattttacatatagttggtacttcataaatgtttatagattttaattgtatctatcgatgtcaagaactttcagtcacatgcatcttagcctggtctcttagtctgtttgggctattatagtaaaatactgtaaactggctagcttataaacaatagaaatttatttctcaccgttctgtgcctggaaagtccaaaatcaaggaagcagcagatctggtgtctggtacaggcgcactttctggttcataggtagcaccttctttttgtgtcctcacatggtggaaggggcaaggcagctctctgcagtctcttttataagggcattaatgccattcatgagggctctgctctcatgacctaatgacctcccaaaagctccacctcctaataccatcacattggtgattagatttcaacatacacattttttggggggcacacaaaatttagattctgattctgattctgatctgatctgattcagaccattgcacctggcatttggagcctcctatgaaaccaagctctctgtttttaacctcatctttaggttggatgcgtggcttctctgttttacacaagctgacggtgttggtgttctttgaatataacacattgttttcctaatgtatactcttctacttacgcagaatctttttcctgtggatttccagttttactacataaagattctgccttaaaattaacttttgttgatgaactctacctggacttgttactttcttacccattgttccttagcctgtatgtttaatcgtgctttattgttgacatacttttcaatacattgttttataattgcctgtgtgacttaaccaatttaattttcccttctcaactagtttatgtctgccttaagtgaagaattgctttaaagtttctttttagtttttcttaaacattgttttacataggttcattaattatagctgtacttgttgagttataaataataaaatttaatttagttataatttttttgaaatggaatgatattcagttcagcatcctaataaatattctctaaaattccgtaggctgtcctttaagagccttgtatgttttaacacgggaaatgccatcttcccttagttgagaatattaattctttgagcagtaacactcagatatacctttcggcaaggctataagttttagtcacatcctaataatacaaagtagagtggactgaaaggaggctcctatcaatagtagtttggggctttgtttttctttataacaaagataagtatctgaatttaaccttgaaagaggttgttgtgagagattaatggaactgctgaaagaacgctgtggtgctgagtcagctctcccaagaccaatgaatattaagaataaagttcaaagaaagtgaaacaatggaaatagagacggggaaaatcagctttacatatatttaagcatattctcttcttagatatatagtcaatgaaacatttgtgtttttctctgtaatttgatttaactctgtctacaaaaacagtttcttcattttgataagagatttttttcctttctgagatgaacacttcttatacttcatttttagatttgccaggaggataattatttaagaaagccttttataaaaattaagattgtctgacatctttttagaaatactgtttctagaaatagtatgtgatttgtcacatgctgggtacatctaatttattaatgttcttgtttttgcaaaaataaattttggtttcctgtttctagaacttctccttcacctatttaaatgtttaaccctgtatcatttcttccttttttttttttgagacggagtctcgctctgtcgcccaggctggagtgcagtggcgggatctcagctcactgcaagctccgcctcccgggtttacgccattctcctgcctcagcctcccgagtagctgggactacaggcgccgccacctcgcccggctagttttttgtatttttagtagagacggggtttcaccgtgttagccaggatggtctcgatctcctgacctcgtgatccgcccgtctcggcctcccaaagtgctgggattacaggcttgagccaccgcgcccggcctcttcctttttaataaaaattttttcttagtaaaacagggctttttctgtatagaatattgtcgtaggtgagtttttatggtgttcttaatgaatgttagagtaacggatcacaatggaaaagtttgcctataaatcagcatctgtttttacatccctgtggatagttgctgaaattacgcgtgaaaattctcttttactgcaggcgaagcatctatacaaattgtgtgcagcttttaaaaactcctatctcaaacggggccattttttaccatttagaaaaaaagcaaaatcacgggttaacattattttttaaaattctgcagtgtttgaaatggactctatagtacttttccctctgaccacatgtcagttcaatttaatagcagtgaaatttattgaaagactgtttattgataggactaacgtgctctccataaaatgatgaataaaattactttaggcactaaaattatcaaaaagcggacactacgttctcagcgagatgaatggtttactcctttcctttgtgttgtgtgagctcttcttggtttgcatttggaagcaaaagtctccagtgagattctttttctcttaaattttatttttaattataagggatacataatagttacacatatttgcgaggtacgcgtgatgttttgatacaagcttgcaatgtgtaatgaccagatcagggtaattagggcactcatcacctcaagcatttatcatttctctgtgttaggaacattataattctgttcttttaggtattttaacatgtacaacaaagtgttgttaattatagttgccttattatgccactgaatactaatccttttattttttgagagaacagaatcaggtatgtaaatagtccgttttctaagacctcagaggcaaaagtcagcctcttacggactacatcagtgtctgttattttaaggaaaagttattttggggaattttcggtaaagactttgaaaactttatgcttgttctttttataagcattacagatcaaagatttatagtgtcctaggattaggtaaaccacatgtccttgcccaagtttctcatactcagctaccatgattttcaagatgagaaccttcccagtctatatgggatatttgtgctatatgttctgtaaaattcattgatataaagcatcatttttatatgtgtacttttctgtttatttaatgaaatacatctgcttttgttttgactttggtttttaacaattgaggttataacagagcagcactctaactgaggggagatatttgaggagttttaaagagaaggaggcagagaatatttttaaattttaacccacagtattgccttaaagtagttggtatgtaaccaaattctgtctctgtgttatgctagctttcacttcatcaatgcatatggcttcagtatttttccccacaaagcatctgagaagttggtaaatgaattctgacatgttgaatgattttaatgaaatcttctggatgtgtatatatgcttgggggatggggaagagggaggcagaataagcagtggggttgagggtaataaagaattactgtctctttacattaaggataatggatagcagttaacattaatatcgttcagaacaggttaaagtctatctggtaagtggtgtttacttccaaggcagcagctcttattattaattcaaataaatgacttccgttaccatgtcagaatgagagttgggagagggaggagagaatgtgggagattgttgctttgggtaatctctgtgaaatcggaattggcctcctttctgctgcagaaaaaggcaaaagcatagtgagatctaccgttatcaagtagctcttctttatgttactatacagccttattaacagtttctgagggaacaacaaattaaattttaattgtggtttctcctttgcctttgcttttctgattgaacgtttgattggaaagaaaggcagttagccgggcgcagtggctcacacctgtaatcccagcactttgggaggccgaggcgggcagatcacctgaggtcaggggttcaagaccagcctgaccaacatggagaaaccccatctctacgaaaaatacaaaattagccgggcgtggcgctgcctgcctgtaatcccagctactctggaggccgaggcaggagaatcgcttgaacctgggaggcggaggttgcggtgagccgagatcgagccattgcactccagcctgggcgacaagagcgaaactccatctaaaaaaaatttttttaaaaggcaacggaggctagagtcttacagctgcattgctgtgtagtttggtgttgacagagctgacgccaagaagtaaaattctgagagatgtattgggagtggtatcgtgagagttgctgtagagtccagcctctcccggttaatctgcctgagtgaagctgtagttaggctgccccaacttctgccctcgtctctttcaatacaggagtcttcttatttaaggagatgaggaattctttgaaaggtcttccttcttctccctctaccagacccctcaaagtagtcacacagacctcctgccgtgaaccctatactctgtgagggaagtattcttatttgatttcagcaaatatatgagattggcaaaagcaggcttcagttacgtaatctagtggtgggaaaaatggtctgggttcgttttggtgagtgcaaatgtgattaatagcagttgaagtaaaactctaaagatactgctttcattttaggtgatatgaaatgtttaaaatgataaaacctgttcttctactatctccggatagctgttaagtgagatgtctgtgacacgctgcgcattctaaattcggggttgcctgaattgtttaagcagagtgaaataaccaaggtagggtaggtgaatgaaataaaactctctctctacttagtcttattcccctaggctgccaatttaatgcttttttctaattaatgagtgctataaaatggcttatctacaaacagtacatgtattgatggcaaaaaccacaattgatttggcaccaacctaataattcccctttgaaatttttaaaattttattttattttatatatttttttgagccagagtcttattccctctcccaggctggagtgcagtggcataatcttggctcactacaaccactgtctccccagttcaggcagttctccctgcttcagcctcccgagtggctgggattacaggtgtgcaccaccaccctggataatttttgtatttttagtagagatggggtttcaccatgttggccagactggtcttgaactcctgacctcaggtgatccacccacctcagcttcccaaagtgatgggattacaggctttatttttaattgacaaataataattgtacatatgtatggtgatgtttgaatacatatatgcattgtggaacgatcaaatcaggctaattaacatatccatcgtctcacatacttatcatttctttgtggtgaaaacatctcaaatctactttttttttttttaaatactttaagttctgggttctgtgtgcagagtgtgcaggtttgttacgtaggtatatacgtgccatggtgatttgctgcatcgatcaacccattacctacatgaggtatttctcctaatgttatccttcccccagccccacaccccaccaaccggccccagtgtgtgatgttctcctccctatgtccatgtgttctgattgttcaactcccacttatgagtgagaacatgcagtgtttggttttctgttcttgtgttactttgctgagaattatattccaggacatgttttcatccatgtccctgcaaaggacatgaacttatccttttttatggctgcatagtattccatggtgtatatgtgccacattttcttaatccagtctatcattgacgggcatttgggttggttccaagtctttgctattgtgaatagtgccgcaataaacatacgtgtgcatgtgtctttatcatagaatgatttataatcctttgggtatatacccagtaatgggattgccaggtcaaatggtgtttctagttctagatccttgaggaatcaccacactgtcttccacaatggttgaactaatttacactgccaacagtgtaaaagggttcctgtttttccacaacctcttcagcatctgttgtttcctgagtttgttttgttttggtttggtttggtttggtttggttttttgagacagagtctcactctgtcgcccaggctggagtgcagtggctcaatctcggctcactgcaagctccacctcccaggttcacgccattctcccgactcagcctcctgagtagctgggactacaggcgctcgccaccaggcccggctaattttttttttatttttttttagtagagacagggtttcaccatgttagccaggatggtctcagtctcctgacctcgtgatccacccacctcagcctcccaaagtgctgggattacaggtgtgagtttaatgatcaccattctaactggcgtgagatggtatctcattgtggttttgatttacatttctctaatgaccagtgatgatgagcattttttcatatgtctgttggctgcataaatgtcttcttttgagaagtgcctgttcatatcctttgcccattttttgatggggtttgcttttttcttgtaaatttgtttaagttctttgtagattctggatattagcccttggtcagatggatagattgcaaaaattttctcccattctgtaggttgcctgttcactctgatgaaatctacttcttcaaaaacaattttgaaatacacagttataatttaaaattggactctgtttttggctttttttttttttaaactttttcccgtgtctactttaagactagaatcagttataatgaaaattcatgaggaaacaggagttgaaggagggtctttattcattgggggccaatagactctgagtatttcattctcatatttcttaaaaaaaaaaaaaaattgattcccaacagtcaaatgtgaggattcactcaaatgtgatgactaagcttattcatgaacctccattgtatatctcttaaaacatttgcccaattttttttcagttgaactttgatgattggcctatcgctgagtaatcttggtgttgaactatttatgaatatgttgaattactctaatttgtaatcatagtcacaagaaaatatcttattagaattcagttcattcgcagagtttattctgaataattcctgatgtaatgcgtgttttgctggtttcacattcagtgaaatgctgagccatacctcaattctgtagtgtccttaatatctgcctttagattttaggtatgttcgggttccattttaatacagtctcataccggcagctgtgtttttgtagtagaggtcctgttagcctaacaggcatttgtctttgagaaggaatttggtcttcatcggtaatccagttttgttatactggagctacatcctcaggttgtgtgacaccctccttccgtttgactccaagtcatcctttacctcctggtgtgcatgcccttgtgtggtcctctcccacaccctgtcaggatcggtctcacgaactgtacaggaaggcagaagtgatggcgccaacttctgaagctagatccaaaagacgctgatgcagctgccttgcactcctgaatccctggccctggcgaaggccggcctctgtgttgtaagacactcaggccgccccgtggagaggaacagaggcctcttgccaatagctgcgccacctcgccagccgtctaagtggaagcgaaggactgaagcctggttgacatcttggctacaacctcataagaaaccctggcaccagaactgttcagctaagctgcttttgagttcctgacccacacagtctgtgtgagataatcagtattcactgttgtcttatgctgctgagttttgaagtaactcattaatacaacaataaacaatgattacaagtattttatatttttagtattaaggtgctctaccatagtctgatttttttcccctaaatccacagtttggttttctctgttagagtagtaaacgctattttaaattgttttattaatattatcaccatggtaattatcagggttgggtactgttggagcttttgttggtgtttatcacctatataactcctatttgtctgctgatagcctgtaagctgggaaaagagttaaaaatgtatgtaaaacatgatgtgtcatatagccttttatagatttatttcatatgtaaaaactgctctaactactgccacattctccagtagaaatataatgtgagccacatgtataattttgaattttctaatagtctcatttaaaaaactaaaaggaaacagatgatatttaataatgttttctttaatcaaatatatccaaaatattattttagcatataatcagtatgaaaattcttaaagaagtgttgtaccttcttttgtttaagactaagtttgtgaaatgtagtgtgtgtttatagcacatctcaatttggactagccacattcaatggctcagtagctacttgttgctagtggctcccgcattggacagtacaaatagtatattaactgaagaagaacgttttcttctaagctagcagcagattaagaatgcctgtaaacaacaggtatggttttcacagattaagtgtggcatgtcataccttaatctccagctacatttagttccagtaagtcaacttcctaatttccagatgcttcagatccttcaaacctaaggaatatagggagaggaggagttagggatagtagatagtatatgtagattccttcagcattacagactcagaatggcttttactgtctcatagtttatcatgaaggttggtgaatgtggactttttgaaggagaaaatacactttaacatgtaaagcatatattccaagcctcgggccacacgtggtatgatccctcttgcacttgagccaccaggaagcactttccaggggttttagcacatccccttacttcaatcagatgtggtcctgagagcagaagtatgtgaactctgttgcatttcataccttctcaagtctaatatgacatcttattgtctcattcagtttcaaggaagctggtgataactgtcacttcttcaactcaaagtctggcattgacagatcagagatttttctttttaagtttgagatttatcttcaggatcttcagaatttatggaagaacttattgtgataatattgtccctttttaaaaatgttcttatttagactatcccatggttatcaaaagacttgaaaggaatttctcataattctgacccacttctgtaaaatattgctatgaagaaattcataggacttttgaataaaaagctgaagaacacagtgatgtataatccatacgtgttttgttctctttacctttcttttgatcatgagcactgcctgaagatgtgtttgcctggtctgcttttctcttttcacagtaaacagttaacttacatattgagagtatctgttacctaaaaatgacagttgtaactatttccagaaggtctctttatatccttactgatttctttgcagtgcaagatgctcttttaagatatttttcaatttgcttttgattttatatcaggacaatatatattttatattatttacacaaataatacttacatgtctcagaataatagtcacttctgttatccttgtgtaactctgattcctcttcctctgagatgaccactttcatctcttttggtggtttctactgtcgtttatttttatctttccaaatgacatttttatattattgttctattatttttcttatttgagcatcatctgttgacttcttatcatagatgatgaggaattagtgtttttacacagaccaacacacaattccttctttctatccttccaacataattatctccaggtctacattattaaaactgaggcacataatatattatgatttacattttggtttttcctagtgtaccttagttttcctttttgtttttcctgtcttgggtatctgttcccagattcctttctacacccgtaaaattcctcccagtatcattactactgtaaaaatacatcagcccttattaattgccctcagataatctgtacatctgctttttttctaggaaaaattaatttcctttctctgctaagtaatgtgtacttagtctctaggttgtgtcatccttatggttcccttcaccactcacctgtgatagagctcctgttctctggatcccacatcttctttccaggtttacctcttcgttttatagagtataccctagtagcttcctgagagagtcgctgagtgaggtccttttttggggggggattttgcattcaactcccatatttgattggtagtttagatacagaattctagattggtaatcattttttcccccttagagttttgaaagcattactcaaattgtcttctagtttcctgtgttgcctttaaaaactccaatgtcttctgattttttgatttgacaagtgatcgtttttggcctttctaaaagttttcaagatgttttctttcccttagtgttctaaactttaaaaaaagagtattcatattatcatctaagcaccaaatgatggatttagtcttttcgcaagagtgaggcaagaaagaatgattataaatgttacctagcagtgctattgctaccctggtatttgtagcactcaaaggctttcctgtttatttcttacactggctcaacattttattaaattaaataggagattcaagctgtggttcaacacaagagaaacttccttggtttattttagcagatctctcaagattccaaaactaaaattggtgccagattttacccactcgatagattaagtaattctggactttgtaaataaaggtgagagaggtatttgctgtcttcattctcttgcattatactatcctagtttgatccagttgccttagactaagcaaatgattccatactcagctttacattgaaatgtaacttataatatcacctaaatattacttatcagccgtttccttttatttgtagtgtcacttggcttttgtttttcatccttattattaagaaagattttgaaccaggctttgcgattaattccagaaatccttttttaaataaggccgtgaacactgagctcgtgtggcagactctagtttcactgctggtttccgataaagttatgaaatgagtttcacaatgaaatattatgaaaacttgattctctgcattatgacaaattactcatcgttttctccctaaaagttttttattgatacagccacaaagctatttttaccccacgcagatgtacaagtaaagttgtttgcttgaaatagattcctgggaagttatttggaattaactgtttgagcctcaatttagataatagaagcctctcaggagacttccaagaaacagttgaagagtgggatagggtagaccgcacaaagacataatactgagttttccacaaggagctgatgagaaacattttcaactttatgtgttaataatgtttctttatgcttctttatacttacagcaatctgtattttagaatcccatattactacaaatatggtcattctcattcattagagggtttgagaagactgaactaatcattgcatccatctcttacttcataatccttcttttatgtttagttttctttgattctgaagaagccaccttggcctttgttttgactggcatcgtcccttgtctctctgcatgacattctttaaaaacctccgctgtactctgctgttcatggcaagtcaacagagggaacaaagatttcaacagagagcgttttttttggttttgttttgttttgtttgatacagctaaactgccctgcacaaaacagaaccttactgatgggaatagatcacagtattttataactgtgaagaaccacagttctctgagaagaatgaaaacttttctcttaacatgaatataacatacatcaccaaaatgtgaagtttttcctaactctcattttttaaagtttagaaaaatgagagagcaaaagatttatcaactgtttattaagaagaatgtgaaataatgatgctgttcttccaaaatggggagaaaaatctgacttatctttgacggatttcaagttctagatttttgaaggtaaagttgtcaaaaaggccttacaaaagtggactgcagtataattgagtttctcagataaaagaaaaaattcttaggtatcttttcctgatatgagtgttctgaaaattggagaatggtttagcaagtcttgttcttttgttttatatatattttaagaggaagcactttattcttaatcctctagtttcgtaagaagttgaagaaggaagtgcttccagtaacctgatgactcagttctccatcctactcgaactcctcttaacatccctcctgtctcacatgaactcagcgttctgtaggattctgtttgactttccgagagatcagcatccgcctctccagaagctgccttttaaacttgtgtggaacatcagggctggggattgcttggttggctaataacatggctcattcttagccagaccagtcacttacatccagttgtcatttttggttttctcatatgagattatgagaaaaccacacattcttgaaatatgaggatgcgtcacttgctttttaatatctcttaagaaattgtttgccaacaattgtctatgaagaatataatctgaaagatcatgctgtttactgcacttttctcatctcggcttcactgcaggaaaagagaatgttttgatattcaatctaattgtcatttcatcaaagctggctttatgcttagagagtagttcgaaaacaactttgtacttttagataatcaagcccttgccacctctgctgtctaacatagttttattctctgttacagagggcaaattcctcacgtttatcttgcttgactaacttgacgcttggctcttaataatatactacttcagcctgctttacttcttttctttccttgctttctttattgtgtcctctgtgacgatatcttgttggatttgcttctgatgggaaggacattgaataagtaaacagcccttccttaaagggttaagtaattaatctacttcacctagtcttccatcattttctaggacagtctccgtaagaaggatgacaggattgaagagctggaagaagcactaagagaaagtgtacagataactgcagagcgggaaatggtgctagcacaagaggaatcagccaggaccaatgctgaaaaacaggtctgctatttcatacagttccaagcaatgctgctggttaaccaaacggtaaaacacaaccagtatagtttaggtaaactacacatattgtatgtttatagggtttcaaaagcacttcatagagtgtaagtcccaaggagttccttcacagcggtattagatacaaggatatggtttcttttctgtcaagtgtagaaagaaagaccaactttattagcaaagctgagagagaattgaacatttcgcagaatgagtgcctttcagtaccctgttcctagataaatgccttgtctgctgtttcttaaataagaatcgaaataaagttgtatgagaattgactcatgttaacacagcagcctctgcgttaataacttaggtcagatcccatatatatttatgtagcatgtgctaatatattggatgaggtgaaatggagcttatctgtctgctacaagactgggcacaaccctggcttttaaatggaaagaaaaacgcgaacttttttttttttttgagacgaagtctcactcttgtcccccaggctggagtgtgatggcactatctcagctcactgcaacctccgcctcccgggttcaagcgattcccctgcctcagcctcccaagtagctgggattacagacacctgccagcacgcccagctaacttttgtgtttttagtaaagttgcggtttcactgtgttggtcaagctggtctcgaactcctgacctcaggtgatccacccgccccggcctcccaaagtgctgggattacaggcatgagctaccgtgcctggcaaaaaaaaaaaaagacacaaacatttctgactgaaaaacgttaattccaaatagctaatagtttattcatttcataccctgcctcactgaagagaagagttgaggttgtaacaagttgaggttaatagtgagtgtgaaggacgtagaaaccgtacacgagtcccggataagcctgtcgcagcctcggaggggcttgccgaagagctctgcgcggcagtttgtggtgcttgttcgacgtatttcctgcgtcttttaagatctccgtactcttgcttttgacttttcattgacttttcatgaataactacagatgggaagtgtgaatggaagaaatagttttaacaagtgaaggttataatcccagctcccattatgagaatgtgatttaagatttcaaatccatctgacacataggttcatagcacttaattttgcagtaattgtttcctttccatttcttagtgggagaaatataaatgttaaagagggaaaaaatgctcaatgagagggtgacaggaatctttctaggaaccccttggtcagaccactggtgttattttgagttaaggtaggtacagtaaagaagggcacgtttccaaggcagacatagcgtgttccccagggagccccttcatagctctgtgggatgcaaagatatggtttctttagtgtcaagtgtagaaagaccaacttcgttagcaaagctgagagatcattgaaccttttgcagaatgagtgcctttcagtaccctgttcctagatgaatacctcgtctgctctttcttcggatacgttcctaatgcacagtcacctggaacttgggtagtggagagctccagagaagggacggtgacagccattgtgtcacccaagggtggggaggaattttcttttatcttgattttaccctttttatattctctcctttatttttcagataaagatttttcttctgctttggcctcattgtttattgacaagtattaaacatcagagatcatgcagagactttggcaattaataatagatcatgtcactatgggttatagacttctgttatgtgttttcctttttgaggctattgtgtgaactgattataatatggtttaggggtatgttttatttatggttaatagactttgcagtttttaggtttacagaaaaattgagcagaaagtacaaagagcttccatttactcctttctctacctcagtttcccctattgttaacatatggcattagtgtagtatttgttaaaattaatgaaccagttttaatacattataactgtgtggtccatagcttagggttcactttttgtggcacacagtcccatgtgttttgccaaatgtgtagtgacctgtatctgccattacactattatacagagtaatttcactgccttgaaagtatcatgcgccaccgatttattcctcccccgtctcccccgtccctgatctttttactgcctctgtagttttgccttttcctttactgatagttggagtcatatagtatgtagcctgttcagcttggcttctttcacttagcatctgcatttaaggttcttctttttgtggctcgatagctcatttctctttatctctaagtagtatttcattgtgtggatgcgccacagtttgctcattccttcagctgctgaaggacatcttggtgccattcagtttttggcacttaggaataaagctgctgtaaacattcacatgcagactttggtgtggatataaattctcagctcatttgggtaaataactgtgagtgtgattgccggattctgtggtaagatcatatggtaagagttttggaaaaagctgccagactgtctcccaaagtggctgtatatcttttgcttttgattgcatgctttttttccttttctgttttcttgttttccgcctttctgctactcactgcctatctgaagctgttgcgtgaaatattgcatgagaccagttatttgaactttaagtggttcgaggtatgaagaaattgcttttacgtttacacttctgaagccttacaaccttcgtctactgtcctctcctctcccatttattattattatttttatcttttcgtgtcttttttttttttttttttgagatggagtcttgctctgtcacccaggctggagtttaatggcgtgatctcagctcactgcaatctctgcctcctgggttcaagtcattctcctgcctcagcctcccaagtagctgggactacaggcatgtgccaccatgcccagctaatttttgtatttttagtagagacggggtttcaccatgttggccaggctggtcttgaactcctgacctcaagtgatccgcccacctcggcctccaaaagttctggggttacaggcatgagccaccgcgcccagcccatctgttcctgtcttttagctccactgttaattttacttatgtatgttaattatatgtactgagataatctgcagatgttcttttgaaatgccttaaatgaggcttttttgtttaggaatattattcttattttctttctcagattcaaaagttacctgtttctcacttaaatttagcttctgggaaagaatgactttctctgataaaggtagggtatctgcatctcttaattcctccaacagcaaagtaaaattgtatgggagccataactttattaaaataagatgtagaaccttccaaagttcgaacaaggaagaactcccataagaaaacatctcttaatgccttttctttattctcacgggatcccctcacagtttactcgttcctaatacatgctgccccacacggagcccgtgctagaaatttagagaagttgtgtgatgacctaatgaaggaaggtgcccctcacctgtgcgagcaaattgagagatgaagtgaatgatccccacaggggagaaccccacagctcctttacttttgctttgtccctttcgacgtggggattctgtttctggaacctttctctgtttaacttttggtgggttttgtgttttattgaatgtgtctattttcttaaactgagcgtaaacaaggtctcctaaacaagtctcagaattgccaggggctaaagagcagtatgcttagctcagctatgatgttatgaactttaaattttttaattttcttttaacattttaaaagaatgatttaaatatcttcactgggccaggatgcagtggctcatgcctgtgatcccagcactttgggaggcagaggttggagcactgcttgaagccaagagttcgagaccagcctgtacaacaatgcaaggcctcgtctcaacaacaacaacaacaaaattgtaattagccggacatgatggggtacgcctgtattcccagctgcttgagggactgaggtgagaggatcacctgagcccaggagtttgaggctgcagtgacccatgattgtaccactgcatcccagcctgagcaacagagtgaggccctgtctttaaaaataatgataataacgacatatttgcacatatgaatttgatttttcttttaaaagccccatttttaaccatgatactcagtgataagcagtgatattttttcaaattgccattttgactttatttggcttgtaaagtataaattatatctgtggtttgctaggtaattatacattaatgagcatttttgaggattacatttttttaatgtataaagttcttcattggctgaaaatctcccctgtcatatatgcagcagccaccaccggaacagccaagttcattttcagagtgaacagttgccactgcagaagcaaacctggtagaggagtgtgtctgtagaagacgacgtgcactgatagaactatagttgttttccttagtctttcttactgccttttttacttttagcgatttccagagtgcacagtttattatttacttttataaacataattctttattggtctgaatattaagttacatttccctcatcgtttattaaatggcagtgatgctctgaaaataaaattatactgtcacttatgcctttttttctgctaatatttaaaaaatatcttgtgcttttccaaatgccgcattaagcgctgaacatgaaaaggtaatagatacagcctctgtcttcaagaagcttatagtttattgggaaagactgaagaatgaacttataattgtggttctgtttgataactaccacgatagaggtctgaatacaaagctttgagaatagaggaagggggcaagcctgaaatccaaatttgggaggtctacaggcttcctggaggaggtgtttatgtgtgaattgagtcttaaaaagaaagaattaggcaaagaagtgaaagatgttcaatgtattccatgtagagggaacagaggtgaaagctgggagtgtctaggaaaccaagttgtagttagtagctacagtcgagtgtaaataggaatggcaagaactatgtaaagaagagaaaaagatgagagagtaagagagatcatttgtataggtgtgcacgatcagatcatgctgaatgaagcatgttcaagcttatgttcaaggaagtagagaacctttgaagcaaagaacaatatttatttttagtttacttgctcattcattcattcaacagatctttattacttactcagtgggtgccgtggtagtcctggagaatacatagtgataaacaaagtagctttagtgtcttgcctgagaccttacagttcagatggggacacagacactaacatttaattactagttatgacaaaggagcaggttttcagaaatacacaatcatttcttgaaagttggagggttggcagctattttagattaagtgctcagagcgggtcctctgtgaaagtagctttgtcctgagcctgaaggctgagaggaagcgcaccatgtgaccagtgggacagaagcagcagttctaatggtaataagtggagaagagctgaacatgtctaaggaagaccaatgtgaccggcgggcaggaacggtgcaagctgtgcagggcttttatatgagccatggcagaaggttgtgcttcgtaagagggatggaagagttttaaagagggcatgacatcatctgatttatgtttttaaaagatcattctgggtattgggtggaggatgaattggggggcggtaagattggaagggggaggatcagatgggcgattaaagcagcccaggctggagatcttctaactgaggtgtgcctacacctgagagtgcatgaacgcttccccaaaaggcacatgggcacgggccctcagcctctgaacacacgtgtccctgaaactgatccgctcaaaaggcacatggacacgggtcctcagcctctgaacacacgtgtccctgaaactgatccgctcaaaaggcacatggacacgggtcctcagcctctgaacacacgtgtccctgaaactgatccgctcaaaaggcacatggacacgggccctcagcctctgaacacacgtgtccctgaaactgatccgctcaaaaggcacatggacacgggtcctcagcctctgaacacacgtgtccctgaaactgatccgctcaaaaggcacatggacacgggccctcagcctctgaacacacgtgtccctgaaactgatctgctcaaaaggcacatggacacgggccctcagcctctgaacacacgtgtccctgaaactgatccgctcaaaaggcacatggacacgggtcctcagcctctgaacacacgtgtccctgaaactgatccgctcaaaaggcacatggacacgggccctcagcctctgaacacacgtgtccctgaaactgatccgctcaaaaggcacctaaggtgtgcagattctcctttgtcattttccccttcacagttctgcactcctcactttacaacagacaaaactctcctgactctttctgggctctgttcctcagaggtggaaaactctggaatgttaacaaaggggccattcagcgaattggcgttaagataatggatgggtctgtcagattgttttcaattctttgttttccacagaattgaaataaaacctaattaagtgccaattggtcgattattataaatgattttcgatgacaggttactgtcgggtttggggcatgtaattctgaaggaatgcaaagggtcgagttatattgctacagcaaaactccttccattcctatccatttatatgatggagctttcttagtgcttacatctataacagtgaaacataccaatggaattgatgctgaacccctatctccctttttttttttttttttgagatggaatctcactccttcacccacgctggagtgcagtggtaggatcatggctcactgcaaccttcgcctcccaggtccaagcgattctcatacctcagcctcccaagtagctgggactaaaggtacccaccaccacgcctggctaatttttttgcatttttactagaaacgaggtttcatcatgttggccaggctggtttcaaactcctgacctcaggtgatctgcccacctctgcctcccaaagtgctgggattacaggcgtgagccactgcgctcagcttgaacctttatctttctattaatagtaatattaacaagagatatctaaactaataaaagtattaaagtcccgttaatcttgttaagataaatatgtttaataagatacattttaattaaaatgtattcttcatgtttaataattattttctcataatacttaatatgtatattggttttgattgattgatactatataactagtgattctaatgataactcagtccacaagaattcttaagggttatgaccacaggaaaatattaaaatatcaaatttaaatttatataaatatttttattgagaaaagtacaaaagatccacacaagcagtctagcacagagtaaattacgttagtataaaattctaaggagaagtagaatggaaacatagagtcagaaaaaggaaaatgtaaataataatttgtcctacagtttttgaatagatgatgatggatatcaagtatggtatttgtattttattggatatttccttttctttaaaaaagtgatgcttttttaaaaaacagtctttaatacccaagaaattaaatctttgcaactctttaaactttcaatgtaaaaaaatttatcaagttaaaatcattctgtctcagtacatttgtgagcagaaaaaaagaaatataaaaaaaattttttttaatcatagttgtacaaactcttttagtaggtataccagcacaaacgtgtagagagactcttggtctatgcaagagtttgggcagatcaggcaatagctgaaaagattccacagtgccagtggagataaagagaaataggtagatttaaaatgtcttttggaagtagagctaaaaggatttggtgaattacatgtatggataaggatagaagagaaaacagagatggccgttggatttctagtggccagctgggagaatagtggtacaattttttgagatgagaaagcctgagggaaaactttgtttgaggataagaagcacgacatggtgttaaagaaatgttagctacattatcatcagtttaggaattgttatcacatcagatatttgtattatttatgtatttagagatgggttctcgatacgttgtccgggccagactgtagtagctacttacaggcatgatcgtagcacactacggcctcgaactcctgggctcaagctacgtttccacaaagctgggactgtatgcatgcacaatttctattttttgaccagttttctcttctgagatccaaacttatgaaatagacagcagcccatttcatatctttacaccaatatttccttgatacctcaaccagaaactgtctaagttcaatcttttgattcttaccttcaaaccagtttttttcctcaggcttgctcatctcatctgggaggacttctttgtaatcttacaaagctgaaagtaggcttactgaatgtgggggaagtcgagtctgagaaatgcaaaagtgataggttaggtacagaaatttgtatactgtggctttccagttcagagggtcattccagaaccttagggaagctgtattccgtaacggctaagaaagtggactgtggagttagaagctgtggttggaattaggcttccaccacttacaaattatgatcttaggcaggttacttgtgggttagttctctgagctgtaaaaggaatagttattacatctgccacattaaagagatgatatctgtataaagtaccttgaacagattctgacacatagtaaacccatagtaaacatctgccactactggtacttctgttgtcaccaccactgccctccatagtaccaaggggaggcattgctcttctggttggttgaaggccccagagaaatgtcatatttctagaccgtatctggttgattcagtagtgacaaacttactgttaaattctaatttacatatgtcaagttttaatactgtgactcaaggaaattcttgtcctctcccccatctggtctcacattctagaagttgtagatttgcatcaactgagaataacacagtcacctaatatgttgatgagatggacattgttcttgtaactggattatttattctccgagagtctgtcttagatcaatacagcttcttaatctgtacattatttcccattttacatccacgcttttctcataaaaaggccaggcgctgtggttcatgcctgtaatcccagcactttaggaggccgaggcaggtggatgcgagatcaggagttcaagactagcctgtccaagatggtgaaaccccatctctactaaaaatacaaaaattagccaggcgcagtggtaggtgcctgtaatcccatctgctcaggaggctgaggcaggagaattgcttgaacccgggcggcagaggttgcagtgagccgagatcatgccactacactccagcctgagtgatagagtgagactccatctccaaaaaagaaaaaaaaagaaaaaaaaaataacttgagtagctttagtaaactgctggaaatatatgctataaaatccagttctaatgctgtctttcacttttactaaaccagatgttctatagtttccagaaggaagggagggaggggaaaaatactttcttagcattatttaaaacaaagtattggttttagaacattatccttagatcttattcctagaagcaagaagatatggaaattttaaaactgtaaaaatgttttaagggtttagtctttgtaatcttaaattggaattggaaacatttgtttaaattcatgacttttttctcttaaacacatagtcacacatgcatttcctaggtactgcaaatacctagaaaacaaattatcttcttagtagcaatgctcactcctagtgctcagatatgatttctaaatactgctcaatattagaaggacttgaaatctaaacaaaagttacttttttggcataaagtgaataagtatacatttttcttcacaagtgcttattggcttctgaaacctctgtagtctttatagtagcactgtcagatagaactttctaaaacagtggtaatgttttatgtctgttctaccaagatggcagcctctagccatgtttctattgaacacttaaaatgtggctagagcacctgaaaaactgatattttgcttttatttaaaaagtaaattttaatggccatatctgcctagtggctactgtattggacagttcaactctatagtatgttggacagatggatgggtggatggatggatggatgggtgggtgggtggatggatggatggttggatggatggatggatggatgggtgggtggatggatggatggatggatggatggatggatggatggatgggtggatggatggatgggtggatgggtgggtgggtggatggtcagtcggtcagatggtcagatggatggacagacagacagatacatagatatctatctacgtatacatagttaacagatactagttagtttttcctcctaagcctgacagagttgtgatactaggatattcaaatacaagcattttctgatatagttactcatttttaaaatttttggttttggaaaaacatttgcaacccaacactgtgtttgtcaaaagtaattttccctgtaagaagtaatggtgggagcctagatcactttcaagggatattacaattgcatatgagtgttttcttccatattcatgtagtagccatagatgcttaaagttacaacatgagtggaggaaaaaggagtagaatagttacagaaatgagagtcgtctatgttagatgtccatagtgagaacgtgccactccagcgttgttaaaagtttatctattgtccattcatttcactattcattcattgtttatcgagatcctcctgtgtgctagaaactgagaatactttattgaaccaaatgagtgtggtcctttcctcgttagtgggggagaaacatacactttaaaatttgatcgtgcaaataaaaaagtatagtattttataaaagtatgtaacaggggaccttatttagagtggtcagggaaagcatctcttcttgttttgttttgttttgttttgttttgttttgttttgtgtagttttgtgtagtttagtttagtttgagacggagtcacactctgttgcccaggctggagtgcagtggcttgatctcggctcactgcaacctccgcctcctgggttcaagcaattatccctgcctcagcctcccaagtagctgggattacaggcgcccgccaccacgcccagctaattttttgtgtttttagtagagactggatttcaccatgttgaccatgctggtctcgaactcctgacctcaggcgatctgcccgcctcagcctcccaaatgctgggattactagcatgagccactgtgcatggcctctcatgtttttcaaatgcatttgtacttagtccggtttttttttttccagtaacactgcattttgtttacgtatttactacctattgctttaagagactgtctctgttttgtctcctagagtgaaagctccttgagggcaggagctgtgtcttatttactgttgtatcctcagtgcccaccactgtgcctggtgcacaagggcattcagtgaatatttgctaagtaattaaattaacttatgagcaaataaatgaaattttgttctgaattccttaatgtttgtagcatcactgtacttactaaacaatttaggatttaatggtaattttatcgtatttttatacttacctaaacaatgttttgaaatgttttctttgttgcaactgcttttccactggatttgataaaatactttttcctctgaacagaagaacttaaaggtggcagaattgtagatttaaagaattagaatagatactatttgaaagttacttacattttttgtgcttgattttaaagcatggtagccagactggaaaaataaaatttagaaatcattattatccctgacctgttcttcactgggaaaacagagagcttatatgtctcaaaaaatgaatgtgcaaaattctaggcccactgttgttgaccgtttagctagtgggagctagctgaaagtcttacgtggcagtgagccttccactctgaaataccaggccaccatgttcatgaaaacatgtaataattcaaaacattctgcatagcagatataaactgatgagaatagtttgaaagtctttttgatcttactttatttccttttagtgggactgatactactttttttttcactcaaagtatgcaatttaatattttttgcatatgcacagttagttgtacaaactatcaccataaccaattttagaactgattttcatcaccccgtaaagaaatcccatagttaatagcactcactcccttctttccccaacccccaacttctggtgaccacctatctattttctgtatttatagattggccaattctggacattttatataaatggaatcatacagtgtgagaactttgtgactggcttctttcattcagcttaatgttatcaaggctctcccatggtgtagcatgcatcagtactttcttcctctttaggaacaaataagatgtcattgtatagctctgtcacattctgattatccatgtatcagttgacagacatttaggttcacttttttgctattatggataatgctactatgaacatttgtgttcaagcttttgtgtggatgtatgttttcatttttctcgggtatgtatatacctatcagtaaaattgccagatcacatggtaactccacattgaacattttgagaaattgccataccttttcccaaaccagctacacccttctacattcccaccagcactatatgaaggttccagatttcttccatatcctcgccaacacttgttacttgccactgaaaaaaattataccatcctagtggaggtacaatggtatctttttttttttctatctcaaattctcttttttttttaattgttattatactttaagttctagggtacctgtgcacaacgtgcaggtttgttacatatgtatacctgtgtcatgttggtgtgctgcacccattaactcatcgtttacattaggtatatctcctaatgcgatccttcccccctccccccaccccacgacaggccccggtgtgtgatgttccccttcctgtgtccaagtgatctcattgttcaattcccacctatgagtgagaacatgtggtgtttggttttatgtccttgcgatagtttgctgagaatgatggtttcccgcttaatctatgtccgtacaagggacatgaactcatccttttttatggctgcatagtattccatggtatatatgtgccacattttcttaagccagtgtatcattgatggacatttgggttggttccaagtctttgctattgtgaacagtgccgcaataaacatacgtgtgcatgtgtctttatagcagcatgatttataatcctttggctatatacccagtaatgggatggctgggtcaaacagtatttccaattctagatccttgaggaatggccacactgtcttccacactgaatggttgaactagtttacagtcccaccaacagtgtaaaagtgttcctatttctccacatcctctccagcacctgttgtttcctgactttttaatggttgccattctaactggtgtgagatggtatctcattgtggttttgatttgcatttctctagtggccagtgatgatgagcattttttcatgtgtctgttggctgtataaatgtcttttgagatgtgtctgttcatatccttcacccacgttttgatcgggttgtttgtttttttcttgtaaatttgttctttgtagattttggatattagccctttgtcagatgggtagattgcaaaaattttctcccattctataggttgcctgttcactctgatggtagtttcttttgctatgcagaagctctttagtttaattagaccccatttgtcaattttggcttttgttgacattgcttttggtgttttagacatgaagcccttgcccatgactatgtcctgaatggtattgcctaggttttcttctagggtttttatggttttaggtctaacacttaagtctttaatccatcttgaattaatttttgtataaggtgtaaggaaggaatccagtttcagctttctatatatggctagccagttttcccagcaccatttattaaatagggaatcttttccccatttcttgtttctctcaggtttgtcaaagatcagatggctgtagatgtgcggttttatttctgagggctctgttctgttccattggtctgtgtctctgttttggtaccagtaccatgttgttttggttactatagccttgtagtatagtttgaagtcaggtagtgtgatgcctccagctttgttcttttggcttaggattgtcttggcaatgcaggctcttttttggttccatatgaactttaaagtagttttttccaattctgtgaagaaagtcattggtaggttgatggggatggcattgaatctataagttacgttgggcagtttggccattttgacgatattgggtcttcctatccatgagcatggaatgttcttccctttgtttgtgtcctcttttatttcgtgagcagtggtttgtagttctccttgaagaggtccttcacatcccttgtaagttggattcctaggtattgtattctctttgaagcaattgtgaatgggagttcactcatgattcagctctctgtctgttattggtgtagaagaatgcttgtgatttttgcacattgattttgtatcctgagactttgctgaagtcacttatcagcttaaggagattttgggctgagacgatggggttttctaaatgtacagtcatgtcatctgcaaacagggacaatttgacttcctcttttcctaattgaataccctttatttctttctcctgcctgattgccctggccagaacttccaacactatgttgaataggagtggtgagagagggcatccctgtcttgtgccagttttcaaggggaatgctttcagtttttgcccattcagtatgatactggctgtgggtttgtcataaatagctcttattattttgagatacgtcccatcaatacctaatttattgagagtttttagcatgaagggctgttaaattttgtcaaaggccttttctacatctgttgagataatcatgtggtttttatctttagttctgtttatatgctggattacatttattgatttgtgtatgttgaaccagccttgcatcccagggatgaagcccacttgatcatggtggataagctttttgatgtgctgctggatttggtttgtcagtattttattgaggatttttgcaccgatgttcatcagggatattggtctaaaattctctttttttgttatgtctctctcaggttttggtatcaggatgatgctggtctcataaaatgcgtttgggaggattccctctttttctattgactggaatagtttcagaaggaatggtaccagctcctccttgtacctctggtagaattcggctgtgaatccatctggtcctggacttttgttagttggtaggctattaattattgcctcaatttcagagcctgttattggtctattcagggattcaacttcttcctggtttagtcttgggagggtgtatttgtccgggaatttatccatttcttctaggttttctagtttatttgcgtagacgtgtttatagtattctctgatggcagtttgtatttctgtgggatcggtggtgatatcccctttatcattttttattgcatctatttgattcttctctcgtttcttctttattagtcttgctagcggtctgtcagttttgttgatcttttcaaaaaaccagctcctgattcactgattttttggaagggttttttatgtctctatctccttcagttctgctctgatctcagttatttcttgccttctgctagcttttgaatgtgtttgctcttgcttctctggttcttttaattgtgatgttagggtgtcaattttagatctttcctgctttctcttgtgggcatttagtgtaataaatttgcctctacacgctgctttcaatgtgtcccagagattctggtatgttgtgtctttgttctcattggtttcaaagaccatcttcatttctgccttcatttcgttatgtacccagtagtcattcaggagcaggttgttcagtttccatgtagttgagcgattttgagtgagtttcttaatcctgagttctagtttgattgcactgtggtctgagaggcagttttttttaatttctattcttttacatttgctgaggagtgctgtacttccaactatgtggtcagttttggaataagtgcagtgtggtgctgagaaaaatgtatattctgttgatttggggtggagagttctgtagatgtctgttaggtccacttggtgcagagctgagttcacttcctggatatccttgttaactttctgtctcattgatctgtctaatgatgacagtggggtgtttaagtctcccattattattgtgtgggaatctaagtctctttgtaggtctctaaggacttgctttatgaatctaggtgctccggtgttgggcgcatatatatttaggatagttagctcttcttgttgaattgatccctttaccattatgtaatggccttctttgtgtcttttgatctttgttggtttaaagtctatgttatcagagactagtattgcaactcctgcctttttttgttttccatttgtttggtagatcttcctccatccctttattttgagcctatgtgtgtctctgcatgtgagatgggtctcctgaatacagcagactgatgggtcttgactctttatccaatttgccagtctgtgtcttttaatgggagcatttagcccatttacatttaaggttaatattgttatatgcgaatttgatcctgtcattctgatgttagctgattattttgcttgttaggttgatgcagtttattcctagcattgatggactttacaattttgcatgtttttgcactatctggtaccagttgttcctttccatattcagtgcttccttcaggagctctttagggcaggcctgttggtgacaaaaatctctcagcatttgcttgtctgtaaaggattgtatttctccttcacttatgaagcttagtttggctggatatgaaattctgggttgaaaattcttttctttaagaatgttgaatattggcctctactctcttctggcttgtagagtttctgctgagaaatccactgttagtctgatgggcttccctttgtaggtaacctgacctttctctctggctgcccttaacattttttccttcatttcaaccttgatgaatctgacaatcacgtgtcttgggtttgctcttctcgaggagaatctttgtggcattctctgcatttcctgaatttgaatgttgacgtgccttgctaggttggggaagttctcctggatagtatcctgcagagtgtttttcaacttggttccatcctccccatcactttcaggtacaccaatcagacgtaggtttggtcttttcacatagtcacgtatttcttggaggctttgtttgtttcttttttctctgaacttctcttctcgcttcatttcatttatttgatcttcaatcactgataccctttcttccagttgatcgaatcagcttctgaagcttgcgcattcgtcacgtagtgttcgtgccatggttttcagctccatcagatcatttaaggacttctctacactgcttattctagttattagccatttgtctaatcttttttcaaggattttagcttctttgtgatgggtttgaacttcctcctttagctcagagaagtttatcttctgaagcctccttctctcaactcgtcaaagtcattctccatccagctttgttccattgctggtgaggaactacattcctttggagtgggagaggcgctctaatttttagaattttcagcttttctgctctgttttttccccatctttgtggttttatctacctttatctttgatgatggtgacatacagatggggttttggtgtggatgtcctttctgtttgttagttttccttctaacagtcaggaccttcagctgcaggtctgttggagtttgctggaggtccactccagactctgtttgcttggatatcagcagtggaggctgcagaacagcaaatattgctgaacagcaaatgttgctgcctgatcgttcctctggaatcttcatctcagaggggtacccggccctgtgaggagtcagtctgcccctacttgggggggtgcctcccagttaggctactcagggatcagggacccacttgaggaggcagtttgtccgttctcagatctcaaactctgtgctgggagaaccactactctcttcagagctgtcagacagggtcacttaagtctgcagaggtttctgctgccttttgttaggctgtgacctgggacccacttgaggaggcagtttgtccgttctcagatctcaaactctgtgctgggagaaccactactctcttcagagctgtcagacagggtcacttaagtctgcagaggtttctgctgccttttgttaggctgtgacctgcccccagaggtggagtctacccaggcccgcaggtcttcttgagctgcagtgggctccacccagttggagcttcccggccactttgtttacctactcaagcctcagcaatggcgggcgcccctcccccagcctcgctgccaccttgcagtttgatctcagactgctgtgctggcaatgagtgagactccgtggatgtgggaccctccgagccaggtgcaagatacagtctcctggtatgccgtttgctaagaccgttggaaaagcgcagtattagagtgggagtgacccgattttctaggtgctgtctgtcactgcttcccttggctcagaaagggaattccctggccccttgcacttcccgggtgaagcgatgcctcaccctgcttcggctcaccactgttggacaagctccagtgagatgaacctggtacctcagttggaaatgcagaaatcacccgtcttctgcgtggctcacgcggggagctgtagactggagctgttcctacttggccgtcttggaaccgccctctagtgggactgatacttccgatcatctttgataagtttgacattaggtttttaaagatttgcctcatcattcccggacttggaaataggttcataatattattaagactggttcattttatatagtgctgtaatgggttacatttaatagtttacagaaatctcttcttaacataccctaaattcattttctttacttgctcttataagtcttaagctgatttgtgtgagggattcttgaaatgagtcgctaagcagtccaaaagtgttacagatacaaacgttattcagaactacgtacaataattctgtcttacaaaaaatatatatagtgttaagttgggaacataagctgtgcttgtaaagcagtttactggtttctgcagaagttcatcatgtttggtcaatgcacagattgtagatactgttgttcaaagatactcgttttaagaatgtaagatgttattatggaacatgatattgataagcatatagaaagtatatttttaatacttcagatacctaagagatatgacagttaagttcacattttctctttgccattgtgtaatcagttcagtatttagatccagttctgtcaagaggaacctagcaagtttcattgtagactctcgctctactatcaaggagtttgaatcccctttgttatggtgactggttatgaaatcagtcacttgacagaccctgaagtgagactgctagaaatacgtcatgtctgccttcatggtgacagctggctacaaaacaaaccccaccacagccattctgcaattgacaagggacttcaaaggccaacggggctgccacttcaaagagaattctgccatctctggcttgttgaaagaagttgttaaatggctgtaccctgccctaccagaaatctccatgtttagacttctccttcttttgatcttagaaagatgtatgaaatgacttaagttagaggaatgataaagtctctagtaatggtaacccagtattctgcattttgatccatttattaatggaaattacccaaatatgttctaataacaggaggtttaaaaactcaatgtctcagagaatgaatgtccaaaagaagagttgaaatttcatagtattgtagccaccttaaaaaatgtggaaataatatgggaaagaaaatgaaactcaaagtgtttttaaaagtttctgtttctttgtgtaatttttagtccttttaatataatcagattctgaatattgatagactggaaaacaacacaagtctttaatcataaggctaattttcatggttaaaactgacatttttccacttttagtaactctgcacttaaagtttcaagctaccttgtactatatttaaagttgtattcatccctttctgctggatgcaattttaaaataattaccttgtgtttatattaaacaacaaaaaaagcctcagagttttaatagaacccttaataaaaggtcagagtactaacaatcatcttcaagaataacaagggaaaaggcagcaacatgaactctttcttttagaatacggatagccctaaaacataaccctttgatggagtaatgtttaatatgcttgaaaaagaaaacagaaaactttataaatgatataacagtaaaaagaagtggagattttatatgtgatatgaacttggagtgtaaattagttggaatttaaaatccttctaagtgaatggcatgaccttttcctaattatatgttttctgtctcatcctatgtgttataggaagataaagctaaagatctttagattcatttgtcctgatctcatatttcttatttctcttaaaatttctctttacataaaatttttagaaatcaagttgacagaaggtttaacaactataacttcctctataattttgccagatggggtcagtagataactactaaagaaattctgaagcagaactgaagcccccaggaaataaccccatgacatagtatgaccaaaaaattctctagacacacgagtagtcactcttcaagtaatgcatttggatttgtctttttttgttgttgttatcttagtttcttcctctagaaaaacctccagaaagtttttttgataaagtagtacatgataatactgtcctggaagttcaggaaatatctatgcctttaaatgtaggcccaagttttcattgtattcagcaaagggactatatctgtgttttcaaaagttatagccatgtgaaaaaaattaactacagtggaaacaaaattttggcacctccaaaatttaaccccagaaatgactgccagaagtctatgaatactggttttcaaagggacttttttttttttttttttaaggtggagtcttgctctgttgcccaggctggagtgcagaggtactcttggctcactgcaagctccgcctcccatgttcaagcaattcttctgcctcagcttcccaagtagctgggactacaggcgtgcgccaccatgctcagctgatttttgtatttttagtagagacagggtttccccatattggccaggctggtcttgatctcctgacctcgtgatttgcccacctcagcctcccaaagtactgggatgacaggtgtgagcccccgtgcccagccagacatgtttttataccctatactcttatgtaaactgcggaacaacttctgtaccaggcagcgctcttggagtctgtgtggcggatctataacaagggatatatcatttgcttgtgatgagttcttggggtgtttggctcttcttttcttctactgagaagtttgataaactaagttattgatcatagaagcagtcatgcaagatagggctgaaggtaaagctctgggagccagatggcttcccgctgatttttgtaggcagtttatattctccttggctgtgtcctccaggatgtttcagtgaaagatatttttttctggagaaatgtgcatggtgggatttatcctgttcaacagatagtttgtgtgtgtgtcatgtcccaagcccgattttgacattcaattgtctcttcctcttatctccaccctctttaataaatgaataaaggtgcaataaaattagtgtaaaatgctttggattagaagtcaagtgacatggattctaatccttgttctgtgtactaacagtgatttggcgtaagttttgtaatctctccaagtatctgtaacctcagctagatggaagaaattgttatccccacaagtattcactcactacctcacactgagataagtgtttccaagggttttattagattgcaaaagcagcatacaagtattgaaccttattatggccaaaatcacacacacacagcatgcacaaacatacacgtatcatgtatgcacatacgtacacatattatacacgcatttacgtggcgtttatgagttccctcttggtgtcctaggcttaccagacataaaatcccatccttatacttttctcctttggctaatagtatacttttgataaggtcaaataagtgtcattttatttgccaacactgtgtttctaacaactgtccagggttatgttgaaataaattttctccacaaaatgtgtgtctaattaatgaaatgtcaactttatttatttcaatgtggcagtttgatttttttcagcattgcaaatgagaagaattaaaatttccagttaaaatggcagtgaacttttatttttgttgaaaacttaagagtatgaatctgttttactcacattatttcatttgatcttagaagaaggactgaatccctacatgatctattttgtttgctgttttccgaataaaatgatcagattatttcaactaacaaggaaatttctttgcaaaacctggacaaattagccattcaacacctgctttattctgttgtcttaactccctagcaaagcaggaaaaaaaaatgccttttcagaagagaacttatcagagctcagatttctagggatggtctttgtcattccacctctatttgtatttcatttcctaaattagacatttgtcacaagccctaatgaactattaagagctctcagacccagatgcagaagaaagcataaaatggtggttgccccatcttctttgttaccactgctggaggaagaaagtgcagtctgttacttagattatctctgtcctcccttcttccaggaggatagaagaaccgtggagcttatgtgtacccagcagagcattaatttttttgtgttcattgattccattatgatgtttgttgctgaaataagcaaatcttgggagataaataatattttgctgtcacagcatgatgtagactgacttaaaaatagaaaaaaatgaaataatattctgctgaaaaaagtttgttttcagtgcattaattcagatgtttattttttagttttgatgctatgctgccaaagtcacctaaatagaatcggcagtgacgaaacactggctcctgttagcctctttctaacatcagtgacacaagatcctgggagcagtagcagcagggtgatgtttgctttgaaaatgtgcatccacattttattgtgtctgatttttcaggccttacttaggagtgatgagtgcttattatgggatttatctacctaagccttctgaggtgattttttaaaaaaagaaaaggaaaattgagatggcttgaaaaagaagcttttctttcacactgatatgtttctaccctcttttaaaaagagtgggaatgggaacactccccagtgactcattagataccattgtggatgactgtggcgaacacggatacattatagcaaagcagcactcagtgtgtttactgggatggagcagactacttagcttggaatcctagctttgctttctctgactatatgacctcagacaaggcactgaaacccacgaaccctctttcttctgccataaaaatgaggataataatactttatacccaccatataggatcattttgaggctttaatgagacaatacatctcaagcacttagaacagtgtacttcaaagtagtccaataatgtaattattattgcaataactatagctattccatgcttataaaatactgtactactggtatatatcttgtcaaagaattaccatgagttggcaaaaagaacatattggaaaaaagagatttctagtgtaaatactaacctaaagctctcttgggaaatgtaaattcaaattttcattagcaatgattgtgagatccgctaaaggaatttcctaggaaaggatgatagaatttatgtatgtagttatagatgtatatatgttttcactaatacttcaaaaatgctcctcaacccaagagcttgttacctttttttctttgtaactataaaacagagagtaggttttaatctggaattttgttccagtcagggaaaccagtggacttctcaagtgacaatctggcttgcgtgatgactgccgaacctctagataatcgttttgtaccactccctttttcttctaattgttttcttcctgtggagacttgtgccttttactctcccaagagagtatgacaagattttccatgcgcgtcttggcaactacagaaagtacttttctcctggttgtggaacagaagaaggtgggaaacttgaagaagcaggctttgccagcctccgaagccccctgttgtgctgctttcttaaggaaaataggtctgtggtaaagtcataatttgttcccttcttattctgagcaaaagtttattagcttgtgatttaagcaaaccatctggtcctgctggcactgcacactgtcaagccccgtgctttctccttaatatgttactggaggcagttaagttacatatttgagtcccaactctggcctgagcttttctgtgttgttaaaacgtctgcttttgaaaattgtgctgtgacctggagtagactttaaaagtgtggagaaattcttcgttgtttagtacaggatttatctcttcttttcttccactcagcggtctttgccctcgtttctctggctgtccccagtactctacaactgctcagtggtgggcatgaaatggaaccaagtgattctagctggaagtgttctcctggattgtggaaacgtaacaaaatgaagtaattaaatttgactttgaaactgtttccctggcttagagccagagaacaaatcagatgattggttggaaatcctggtttatggtgcccgtcttgccttgaataccaaaatgctttagaacttgtgtggatatatgtataatctgaagcagaaatactttgaggatgtggcactcaaatggatgggaaaattaagcaatctttaagaaaacgattgtactcacagataacaatccagaaggtagagatttttaaattttttaacaatacgtaatagttgtacatatttatgggctacgtgtgatattttgatatacgtatacaatgtgtaataattgtattacagggtatccatcacctctaacatctattatttctttgtattgcaacattccaaatcttctcttctagctattttgagattcacaataaatgattgttaactatagtctccctactgtgctattgaacactagaacttactccttctatctaactgtatttttgtacccattaaccaaccccccttctttcccctctccctcttacgcttccaagcctctggtaaccaccattctattcactacctccatgaaatcacatttcttctagctcccacatatgagcgagaacaagcaacatgtgtctttctgtgcctggcttgtttcacttaacataatattctctagttccattcatgttgctgcaaatgataggatttcattctttttgtggttgaataatattcctctgtgtgtgtgtgtgtgaattttgtgtgtgtgtgtgtgtgtgtacataccacattttctttattcattcatccactgatggacacttaggctgattccatattttggctattgtgaatagtgccacacagtaaacatgggagtgcaaatatctgtttgatatactgatttcctttcttttggatatctacccagtagtgggattgctggatcatgagatagttctagttttagttatttaaagaaacaccatactgttttccatagttgctgtactaatttaattctcactaacagtgtatgagtgttctcccttctctgcatccttgccagaatttgttactttctgcttttttgataacagccattttgaactggggtgagatagcatctcgttgtgtggtttttttaggagtggtttgagggagacacagtatcttgttccgttacccaggctggagcacagtggtgtgatcacagtttggcgtgagctgcaaactcctggactccagcaaccctccagaatggccgagactaccggtgtgcactgtcatgcctggctaatatttttgtagagatggagtctccctctgtggcctacgctggcctcaaacccctccctcctgccttggccttctggaattacaggcgtgagccaccactctcagcttcactgtggttttggtttgcatttccttgatgattagtgatgtcaagcatttttcgtataccttttggctatttttatgtcttcttttgagatatgtctatagagatcttttgctcatattttaatcaaattttttgtgtttgttttggaagtaagagttttgaatgaagggtaaaatgtgttcttaaatatgacagacttgatgctgggggagtaactttcacaaaaacaattgaagatagtcaataaaatatgcatttatatgtggcagaaagctaagaaattctcaggtcaggggatgaacagatagggaattcaaaaataaatacttgataactgttgaacgttgggttttgtatctccataggataaaaggaaagatcaaggcagcccaatatagtcaagtggaaaaccaaatccctctcacccttttataaaacaaatccacaaagcccaaaattcattcttcgaaaacaccaagaaagtcagctggtctttggtgagactaaaagaaaaaaagaaagatggcaaaatgaacaatatttattttagaatgatagagggttcacaactactagtcttgcaggtgctaaaaagatacaaagatatctttgccagcacattcgaaaatttagactaaatgaccaaatgccaggaaaaattgaactcagcaaagccaactaaatatgaaaaagaaaacctgagaaaaatgagggagtaataaaaatttttcctaccaatttcaagcccagagatttatattggtaacttttggcaaatatacaaggagcaaataatttcaatcttacagacacaattcagaaatataaaagagagggaacaatcactcaacaacatatttaatagggctcacataactttatatcaaaactttacaagttaatacaggaaaagaaaagcttaggcctgtctcagtcctgaacatgtagcaaaaatccctaaacataatcacaccaatccaaaattagtgtacacaaaaaagaaaaatgtgcatgagcaagttttattccaagagttcaagtttggcttaacattagaaaactcgtgtaatcctggctaggcatggtggctcatgcctgtaatcccagcacttcgggaggccaaggcagatggatcatttgaagtcaggagtttgagaccagcctggccaatgtggcaaaaccctgtctctaggaaaaacaaaaattaaccagacatggtggcgcatacctgtaatcccagctacctgggaagctgaggcaggagaattgcttgaacccgggagacggaggttgcactgagctgagatcacaccactgcactgcagcccaggcaacagagcaagactccatctcaaaaaaaaaaaaaaaaaaaaaaaaaaaaggaaaactaattactataatccaccacagtaaaagatgatagaagaaaagttatatggtcatctcaagaaatgtagaaaatttacattcatttataattttcaaaaattcttaactacctagccatacaagggaatttccttaacttaataaagggtatctattaaaaattacactccttatagataaaacttataggggattctttttaaagataggaataaaagagaatgcatgctgtcgtcatgtctgtacagccttgtattagtcattctggattatgcagcatggccagtgaaagaaatggatattgtaagaattacaagaaaagaaagaaaactgtcatagttgtctatatagtaaacttcaaaatctctcagtaagagcatttaagaagacctctagatacagaatcaatataaaaaattcaatttccataatctgcactgaacagaaaatttacgttttttgtaaaaacgatactatttactagaaaattaagacacataaagtacctaggaataaatattattaggatgtttaacatcttaatgagaaaaattattaaactttatgaaagatattaaagttctaaaaatatatctagttcattacctgttccagaacagtacctggcatatgataaaatctaaatatttttgcagaagttcaagaatagctaagatgctcttgaagagaacaagctgagacttattagatatcaagccttataaagtgataataattaagataatgaatgtagtattggtacaggaatagacaaaagagtggattataatagaaagtgcagaaatatccatgtttatgaatatacttgatatatatcaaagcttaaggtagaatagatttttaaataaatggtactgcaaccctggctatccatatggggagaaatgaaatcagacccctgcctcataccatatacaaaaatgaattccagatggattaaggactaggcatgaaaagcaatactttaaaactcttacaaagtttatcaatcagatattgtgtaatgaacaaccacaaaatatcggtagcatattgtgatggttagcttatatgttgacttgactggccacagggtgcccggatacttgctcagacagtattctgggtgtttctgtgagggtatttggggatgagattaacatttaagtcagcaaaattgagtagagcggattgccctccctgatgtgggtgggccttatccaatcagttaaaggcctgagtcgaacaaaactctgctctttcccaagtgagagagaattccctcggcctaactcccttcgaactggaacattagctttttcttgcattcattcagactcagactgaagcattgactcttcctgggtctggagcctgctagccttcagactagatctatcccattgactctcctggtttttcaagcctttggatttgtgtggaaactatgccattggctttcctgggtctccagctttccaactcaccctatggatcttgtaatttatgagccagtttcttataataagtctttatttacacatatacactgtttctctggagaattctgactaaggtacatacaataacaagcatttatttctcattcacattcatggagggtgagcatggttggctctgagttaggttttaactggggcagctctgatccacatggctctttctagggcccaactgagggacagcagctgtgcaaaatgttgttctcctggcaatggtagaaatgcaactcagccacccagactgtaagcctcagcttgtgtcagctctgcaaacatctctttgcccagagcaagtcacgtagcctagccaaaggtactcagggtactttgcccatcgtaagcccatagcaaggatagagatgtatatttttactctcgaggaatgaataattgagaccactaattcagtctaccagtgaaaccagtataaaagtaggaaatacaactttaagtataagaagggtttgttaaacagaatgtaaacgtcacacattctaaaataaatgtctgatacatttgaatatattcatatatggtatagtcatgcattgcttaacaccaaagactctaattgcatctgagaaattcactgttaggcagtcttccttctgtaaacatcacagtgaacttacacaagtctagatggtatagtctgctacacaccgaggctgtgcggtatagcccttcgcttctgggctacaaacttgtagaaagcactactgtactgaataatgtagtagcacaaaggtaagtgttttagtattcaaacatatctaaacatagaaaagtacagtaaaagtacaatataaaatattttttaaaagataatctgttaaggaaacttaccatgagtggagtttgcagggctggaagttgctctgggtgagtcagtgagtgagtggtgggtgaatatgaaggcctaggacattactatacgccattgtagactttataaacgctgaacacttaggctacactatgcttattttttaaatgtttttcttccctcaataataaattaaccttagcttactaagcttactttttttataaactgttaaattttttaaagctttttgactcttttattatagcattatagtaataacttagcctaaaacacaaattaataacttagcctaaacacaaacatattgtacagctgtataaatatatttaaaaaattttctttatatccttatataaccttttttctattttaaaaattttttacttttttatgacctttcaaaactttttttcccaaaactaagacatcagcacacacattagcctatgccagcacagggtcaggattatcaatatcactatcttccacctctagatcttgtcccacgggaatgccttcagggacaataacacacgtggagctgtcctcttcctaggatgtcagtgccttctggatacctcctgaaggacctgcctgaggctggtttacagttaacttaaaaaaaaaaaagtaggagtacactctgaagtaataagtatagtataataaatacgtaaaccgggaacagttgttcattattattatgtattgtacgtaattgtatgtgccatacttttacataaccggcagtgcagtaggtttgtttaaccagtgtcactacaaacacgtgagtaatgcattgtgctacaacattatgatggcagctacatcactaggcaataggaatttttcagctccattgtaatctgatgggaccaccatcatatatgtgggccattgttgactaaagcattacatggcatataactgtatttctgattatcaaaaaccagtataatggaaagaaaaaataagccataaactggaagaataaattggctacacatgtagttgataaagggttgttttctagaatatgtgttcattaatgtgtttatgactcctttaagtcagcaagactaagaaaaacaagcagttggtggtgtgtgggaaggtggggatagatgtcgctggaaatttgaaggaaggaggagtataaatggtttctaaacaaataaaacatgtgtaacttcactgatattatttagatgattaaacaatttgataaaagattaataaatttataatgaagatttctatcaggccagatgtggtggctcacacctgtaatcccagcacttttagaggccgaggggggcagatcacctgaggtcaggagttcaagaccaacttgcccaacatggcaaaaccctgtctctaccaaaaatacaaaaattagcctggtgtggtggtgggcacctgtaatcccagctacggaagactgagacaggagaattgcttgaacccaggaggcagcggttgcagtgagccgaggtcgcaccactgcactccagcctgggcaacagagcaagactctgtctaaaaaataataataataaataaattgattaaaataaaaaatatttatatcatactgctgtcgcctgaacccactaatcaatgttattgttaaaaatgggaaagacaacgagttatgtatcttgtgtgatatactgtgaactacacagcctgacttatgaaatattatcgtcaaaaagaccaaaaacactgaacccaaatctaacgaagccgtaacacctttaaatctttcagtttagaagaaaaacgaggacaagaagaacagattaaatggcaccattaagaaatagtcaacaaaggccgggtgcagtggctcatacctgtaatcctagcactttgggaggccaaggcaggcagatcccatgagttcaggagttcaagactagcctggctaacatggcaaaaccctgtctgtactaaaaatacaaaaattagctggcggtggggtggctaaggcacgagaatcacttgaacccaggagatgaaggttgcagtgagccgagatcgcaccactgcactccagcctgggcaataaagtgagactctgcctcaaaaaaaaaaagaaaacaaatagtcagtggaatccagaatgtggtacatagtacagggcaagtgacccagtgtcatcaggaagttaacgccattaagaaattagaagtatgaagtactggggcttttgtccaagcaccatttgttcaaatgaatcttctttccccattgaactggcttggtacccttgtcaaaattatgaccagaaagttaggactgatttctggactctcatttcttttccattggtatctttatccatcattaaaccagtaccaacccagaaactttgtagtacgttttgaagtatgagtagccctccaactttgtctttttcaagatgtttttggctattctggctcctttttatttccatgtgaatttgagaatcaccttgtcaatttccacaaaaaaacaacagcttggatttttatagagattatggtgaacctggaaagtatcggccatcttaacaatattaagtctttcatccataaacatagatattccttttatttaagtcttacttctttcaacagtgttttgtcattttcagtatatacatcttacatttcatttgttaaatttatgcctcaatattttgttctttttgatgttattttaaatggaattgttttcttcatttcattttcattgctgtgtatggacatacagttgatttttgtatattgctcttgtgcccttcaacgtttgagtgctcatttattgtaattgatttttagtggattccttgcaatcattctgtgtgcaaaagcatgtcattgtaaactaaagatagtttatgtcttcctttctgatgtggatccttttaattttttgtgtggcctaatacccctggctattgtgtctagtacagtgttaaattgaaatgataatagacattctggtcttgttcttggtcctcgtcttagaggaaaaacattcaacctttcgtcattaaggatgaaattacctgtggggttttcacagatgcctctatcagttgaagaggtcctcttccactcccagttcgttgagtgtttttagcatgaaaggatgttagaacttgtcgaatgctttttctccatcgattgagatgatcatagagtttttttcttgtagtctgttaatacggtgtattattaatatgatatccagtagccttgagtccatttagtgttgctataaaggaataccttgggctaggtaatttataatgaaaaaggtttcttttgctcatgattcgggatgacttgaaagttcgagcacaggtgtctgtacctggtttgagcctcagggtgtttctacccatggtggaaggtgaagcggagccagcttttgcagaggtcttatggtagggaggaggcaagacagacggggtggtgccatgctctttttttaacaaccagttctttctcagtgaactaatagaatgagaactcagttcatccccgaggaagggcattaatttatttgtgagggatccgccccatgacccacataactcccactaggcaccccacctccaacgctgggaatcaaatttcaacatgagatttggaggggacagatgttcaaaccaggccaattacatcgattcatttttatatgttaaaccacctttgtattcctgggataaatctcagtttttacatgttgttgggtttggttttctagtatttcgttgaggattttcgcatctgtacaggagatattcctctgtagtcagttagttccctccctgaatccctcccttccttcctcactggttttggtatcagaattgcttgagcccaggaggtggaggatgcagtgagtgctctgtctcaaaaaaaaaaaaannnnnnnnnnnnnnnnnnnnnnnnnnnnnnnnnnnnnnnnnnnnnnnnnnnnnnnnnnnnnnnnnnnnnnnnnnnnnnnnnnnnnnnnnnnnnnnnnnnnnnnnnnnnnnnnnnnnnnnnnnnnnnnnnnnnnnnnnnnnnnnnnnnnnnnnnnnnnnnnnnnnnnnnnnnnnnnnnnnnnnnnnnnnnnnnnnnnnnnnnnnnnnnnnnnnnnnnnnnnnnnnnnnnnnnnnnnnnnnnnnnnnnnnnnnnnnnnnnnnnnnnnnnnnnnnnnnnnnnnnnnnnnnnnnnnnnnnnnnnnnnnnnnnnnnnnnnnnnnnnnnnnnnnnnnnnnnnnnnnnnnnnnnnnnnnnnnnnnnnnnnnnnnnnnnnnnnnnnnnnnnnnnnnnnnnnnnnnnnnnnnnnnnnnnnnnnnnnnnnnnnnnnnnnnnnnnnnnnnnnnnnnnnnnnnnnnnnnnnnnnnnnnnnnnnnnnnnnnnnnnnnnnnnnnnnnnnnnnnnnnnnnnnnnnnnnnnnnnnnnnnnnnnnnnnnnnnnnnnnnnnnnnnnnnnnnnnnnnnnnnnnnnnnnnnnnnnnnnnnnnnnnnnnnnnnnnnnnnnnnnnnnnnnnnnnnnnnnnnnnnnnnnnnnnnnnnnnnnnnnnnnnnnnnnnnnnnnnnnnnnnnnnnnnnnnnnnnnnnnnnaaaaaaaaaaaaaaaaaaaaaaaaaaaaaggcatcaaaaaagcataatgttggatgaaataagaagatactgtttatatgaagtttataaactggtaaaaaaatcagtgatttattttggcatgtatacattagaggtaaaaataaagacatgtaagggtgtaacactaagaatgctgatgacctttcgtgggagattcagcgagatacagttgcaattgcacttacaaagctcccgggtagtgagtatatacatgagtgctttgctcttgattctaaaatacatgcatatggtaggccccttcttttgcatgcaatattttacattgctcattcataaaatgtaaggtagttatgtgcaataaaaaacattgtgaaatctttttttgtgggaggcacgccaaccaggtgccgaggcaggagaccgaaggcacaagctgttccagtatcagaaagaaaataatcagaataataaaagttatattagaaataggatagagatatgattatatatgaatattataaatcattagcttgtagtgttactgtttgttttattattataataatttcagttctatagttataacctaaggaaataccaggccatacagaattaggagctgaagggacactgagcagtgatcagaagacaagagcgtgagtcctctgtcacacccagataagggccgcttgagggctccttggtctagcggtagcgccggtgcctgggaaggcacccagtacttagcagactgggggagttcgagaacactctgctccaccacctcttgtgggaggcctgacgatagccaggcctgcccactgtcatccagaggcttaaacctctctctgtggtgctgtgcttcagtggtcacgctccttgtccacgttcacattccacctgtacacctggttcctccaggagtagcagaattagtaaaagtattgaagtcttttgatctttctgtgaagtgcatacaagaaatgctgatggacgctgtccttcctccccgcctcggctaccttaaagggaaaggccccctgtcagatgcatacatgactcgcataaccttatcagtcatttgagatcactcacacttcttaccctgcccgcttgcctagaacacagtaaatagcagcgagtgcaagcgttcggggccactacccatctctgcgtcttggtgatcccccgggcccagctgtcttttctcttatctcgtcttgtgtctttatttctgtgatctctcatctctgcacacacagagaaaacccacaggccccgtagggctggaccctacattttttcctacaatttatgagtagtctgtaaagctataatcttttgcaaagtaggtagtaagtttcttctaaccatgacttttgaaattcttctatcttcatactaataaaaatgaattttaaccattacaatgtatgccaaaatcggttgcatatgtattgtaaatgaaaacatgaaacaataaagcatttataagaaaggatagaagagtattctcatgaccttgaagtagagaaaatctttttcagtatacgaaaagctctgagcatataagaaatataaaggagaaaattgattaaactccattaaaattaagaactgctcattattacaagtgctttaagtaaatgttggtattttcacacaatggcataccatacagttatgataattgcatcctgcaacctggatgaatctcactgattttaaaaatctgtaaaattatatactacataatttcatttgtataaatgaaaaataaacagtcaaaattaatctagagtgttaaaagacagaatactcttttactccagttactatctgcaaaggggatatgcgggcagtttctggggtactggtaacgtttagtttattttgtgtgctggttacatacgtgtgttcactcagaaaattcttaaggctgtacatttttatttgtgtatttttttctatgtttattttatatttcataaaaagtttcctcaaatgtttaaatgcataggagtatgtatggaatgggcttgcatttgtgtagaaaaaggaggaataggtcatttatacatgcttgctggtatatatgtaaaatatctgtcgaagttatgtaaggaagtgacaatgttggttgcctggagtggcaaaagacaggatgggaggaagattttttgagatctgtttaagataaattcatgaaagatggacacatcctgtgctttgtgtgttggagctcctataaatggttcttatccattactgattttatgttataaaaacatagcttgatgtattatttgtaccctattttagataaaatagataaaatagtctaaattttatttagataaaattttacatgaattaaactgataaaattgaatcagtggtatatgttcatgtaaagcttgcagatatgtgaatacatatcccaatgtattacatagcaataatacattttgtttattagagacagggtttctccatgttggccaggctagtctcgaacacctaacctcaggtgatctacctgccttggcctcccaaagtactcagattacaggcgtgagccacagcgcctggccttaacaatgtattcttatggcaactgggactgtgaggatgctgttagcagaagacattttacttgctgacttctggaaggataaaataattcaggtgccaaaaaaactaaatgcatctgcttactatcattgtttaacagctgttaccaatcaacatgtaaactttgtttgggtatgaagcactaatttccaaggatcagtgaaacaactttgatttgttatgctgatttttgactctaggcttctctggtttagcctcacacaaatggggcttatgtaggagtcaatgaatggcaaatgccccacctctacctgccctgccctttacttctgaaaagtctggttattaccaagattatttcttggcagttaacaacttaacataaactgttgtaattgatgccgttggctgtttggttacatttgcttctgaattaaaacgaacatgtttatttaaataattctgatttggtagccacctggaataagtggaaattactgataaagtacttacgttgctctcttagtttcttttccttgtgttttagcatttcgtctttcttctctggtggttttttgtttgttgtttttcaggtctgtttctgtcaaggcttttttttttctcccccccatgtcatttttaaagcattctgtctcctttctatccggggtgtgtgtgtgtgtgtgtgtgtgtgtgtgtgtgtatatatacacatacatatatacacacacacatatatatacatatatatacatatatatatatacatatatacacatatatatacacacacacacatgtatatatacacacacacacacacacacatatctatataggtatataggtatatatttccttcctgccttccttaaaaaagaaaccttacctacctggatttagagcaagaaattgtctgattgaattctagcagtttctttaaaaagaaattctttttaatgacgtaaataggaaaattttagtttaaaggactaaaaattattcatctatgtatacaggaaatctgttattaacattagccaagtttatatattttatttcctaaaatcattctgtatattattttgtttttttatatttatgtttgtattatattatttccatggaaatttctgggtcatttccagagaacttccttaaaaggtattgtcggtggcagcgtgcggcttgttaactgatgactcgacacccttgcatgtattaagttctttccgaccgaaacttatatagtataattatatactgtataattgttatactgtagggatgttattatctgctatattgattcttgatatatacatacacatatctgatccagaaagagcacagaatttttaatgtgttcccttgtctcttcaattttctggacccaggagttgcctgttacccaggtcctctgacttaaattgatcgagatgttctgtttttctccttcccatattcgtgataggtggaggagttactgatggccatggagaaggtaaagcaggaactagagtccatgaaagcaaagctgtcctccacgcaacagtctctggcagaaaaggagactcacctgactgatctccgggcggagagaaggaagcacctagaggaagttctggagatgaagtaagtgtttgtgtcttactcttcaagcacaggctccgtggaaatgctgtttctccctgtcttcgtccggctctgtggattccccagtacacttacctaattttaatgctgacttgtacttctcactctctagaataaatctggtcaaaggtggaacaaatcctgatcaaagagaaatatttttggttcctctaatgaattttaaatcctctggcatatacgtatctgtgtgtagttaactctctgagattcctaaaatcttctggaaagttcaggcaaaatggtgagcttactgggaagagggttattggttctgaggtcgtaggaagacgaggcagtttttaaacacattttttattgtaaacatttccaaaggtacacacaagtagagagaatgaacccccatatacctgtctccaagattcaatagttaacattttgccacactggaaaccaatttttagaaaattgtcacttttagcaaaactttgctatacagcattttcctgcttcccccacattttgtaggttgctgagactataatctgttctgaagcatgtatacatctgctaatacatagtagatgtttctttttcttctcagtaaccttctgtttaaaacaaacatgtctttttgccttcgccttacctaaaggccttactattattttactgaaaccaggtctatcgtgggatccctcagttaccttcgttatgtcagcagttatcttatttttgttgtcttcttttctgtctcagaggataggttttcttctccttcataaggccagattcttatttctgtcacagattttaagtccccacctcagcagcctttcgctgtcagttctctctcacataatccttgctcacttctctgtgtaaatgcacagtctgtctttgtcctaaaataaaattttttcactccaactagtgctttaaactgacatcagattacttttctgctactttgaaatatcagtaaactttgaatacctgaataatagagctgtacagaatcttaccatgataccttagcatgaattctcatgggacatgatgattgcgatattgtgactgcaacccaagaatgttgaggtgtcctctgtgctttcacgttcttgggctatagtgcaaggctgagattctatccttttagaaaaacattacaggtgatatgtcttggaaataatgcataagtgaagccagaagtggattggcatacggggagaattaagagaggttagggttccaagtagcatcatgagaaaaaagcttgcaaatttcagtggagaaaggggagtcgtccctgtgactgttcgcaatgacactagattcttcactctgtagtcattgcaggacccaccgtattttaaaggtttaaattattcaattattgatcattgaacaagtaaaaacacttagtctacctagagagcttgagaggcggaaatatgaggggaatgaaatgtgcagggaggctgaaacatgcatatgtgtgactctggatctagaataagaaatagtcttccctgaggaaaagtagttggcccatttgtatagaaaattcttcagcaaagcactagaatagccttgttttctggaataatcctgacctcatcaagccaagagaaatgaattaatagctgttctccattcctagcatatattattgtaatttttgagcgtctgttacagataaatggtgaccgtaagtttggggagacgtaaaacggttcacttggtagcctgccagtggtgcattagaaacatttgcgttggttagccagccctgaagagaaggaacatttttattggcagatcccacaatggttcttctcttccttatgctgaggttttgttaaccattacttttttattccacttttatgttagcctttttcccttaagaaagaaaggataaaaggaagcaggggaaaaataataaaataacaactgtaataactgtaataaattttaagtatcagttgaggtcatgaggttcactattaagaattctagatgagctagttcattcgacactgccctgcattcagactcctcctgcagtcccaccctacatcagcattcagaataaattttacaagttccattttttatttttaatagaatttttattaagctgtgaatttgactgccctgacaactggtttgttcagggaaggggtggcagagctctttggtttcattgagagtttagagctattcaataggtagcctcctatatgcaggcagttagttgtaagtcgttcaaagaatgaaaccaacgagtagaagttaaacaaatcactatactcattgggagcttaaaaaaataaataaatatgatttaaaagttgatgtcaacacaggtgaaaaatgaaaaatattagaatctcctgaactgactagacagacatgtttggaagactggtcttctctggaaacaagtaaagctggcagaaaaatccaactatctctatgttaaattatatactcatgagatgctttctggccaaaaaaaggtctcccacagaagataaattttcatatgtacctaagaggagtccagtactaaattctgacattttaaaaattattgacaggagagaaaagtagagaacaattgcaattaagagagctgttaacaggccgggcgtggtggctcacaccagtaatcccagcactttgggaggcggagtcaggtggatcatttgaggtcaggagtttaagaccagcctggccgacatggcgaaaccccgtctctactaaaaatataaaaaattggctgaatgcggtgactctcacctgcaatgccagcaattggggaggccgaggccagtggatcacaaggtcaggagtttgagaccagcctggccaacacgtactaaaagtacaaaaattagccaggtgtggtggcacacactgtaatcccagttactcaggaggctgaggcaggagaatcacttgaacccaggaggcagaggtcgcagtgagccgagattgcgctactctactccagcctgggcgacaagagtgaaactctgtctcaaaaaaaaaaaaaaaaaattatggggttgctgacattaaaaaaaaaaaatctcattagggatttatgacatagtgttccaaattaaccaccaaattgtatatagttatccaaattatatcctagtaacaatttaggggggaaaataaaaatgaaaatgcattctgagttacgtaagagtgtgtttactcttcacaaagtcatatttatttatacttccaccaaaagccattttttttaaaagtctgtacacatatgataaaagacttttagtggacttggaagcatttttcacaatgggctggaatactgaggttgaatgttatgtaggaaacccacataaattaatataaaattattttacacttggaaaagaaaacaaaatatgttgtacagtttagctataaacaaatagcattggtgggtctgggactagttaaaattataaagcaaagtttatatctacaatcaactatcccttgggactcctcctcagttttgcttaactgtctcattctgctcccttttttttctgccctgatattcagtgctcttatacggcacaccctatagaaatttatttactttcttgtgacctgaattggaataaattacaaacaaccctaaatgttctttgactttctccttctttaaattttaaacttatttttaaataacttccaaatagaagaaaccacgtttaaaaaaaaaatccatgctttctaatcgtatttttatgttaaaagcctcaagtggctggaataaggtctagcaaataaagaactaaacttttcaggtaaaggcccccaaagtccctcttgttttcagctttcaaaattctttctctctctctatcaatatatggttcacatgtaaaaatgtgcttacctgtgtagggatgaaattaagactctctgtcatctactcctcacaagaggaaggaagtgagattgttgtcctactttttcctcatcttttctttttttctctgctggaggtataggatcaaccctgatcccttttgttaaatataaatgaatcatttaaaaggttaattattgcaggtaggtaacctgatgccttaacctaattgcaataaccatttgaagaaaatctgatatataatttaccagtatggcaggtgtttttgggtttgtttggatttttgatgtttttttgtttgtttgttttttaattttcctttcaggaccatctttttcattgtcctccagagtataccctataggtagctactcactctgcaaataggtaaaactcccctcaagctatggatgtcaaatatagtaacgtatccatttaatcatcagcttttctttcagaagttactgaatgaaagagtattagaagatgctctgtgtagcaaaggatgtgcttacattttgagccagtttgcttacccatgaaacaagcataataatacttagacccatctcatgaagttgttgtaaggatcaaatggattttttaaaaaaacacgtttacgttggtaaagctgaatgcttgcaaagcatgatatttacaactgaaaatccaatttgtacttttgtatttgtacctggagaaatcacttaacttttcaggtttgcagttttctcactcagatttgaaagagtttcctaaatctctaagatccctcatcgatttaaaaattgtgtactttggccagatgacctcctgaggtcccctgattctgcagtcgtaaatgtcctgtgtaaatcagggaagtaattcatatacaaacagtatactacggagaagttggaggccagacgtcatgattcctggctgaggactaggctacatgttcactgagtgagactgcccaaggcttaccagagattagatgctacagaatgagagtggaatcgtaatgttagagcagtggggatctgcagttccaacccagtcaacatggagaaatccttgttcacttcagttatctagctgagataacaaaaaagataggttttaggagcaaggaccatgctctaatatcaggcctactctagacccaggctaagactagtaaaccgaggcccccgttaagtcttacagggtagaccagatttggacggtgagtctcactgagatggagaagcctgggaaatatcctgagctctcagcagatccgcctgtcaaaggttaaatccaaacctacacaagtgcagggagtcaactattaactgacttgcatgtaccagaataaaaatcactgctcctcagaagaaattaacagaaccatatttgcaatatatcccatgttgaacttttaaaaattaccagacatgcaaagagtcaggaacatgtgatctgtagagcagaaaaggagcgtgtggtagaaatcacctctgaggagtcctattcggtttaacagaaaaaacaaaaaaaactaaattcaccgttataaatatacatcaaagaatgagagaaaaatgtcatgttggtgatggaatagataggaaatctcaacagagaaaggaagactattttaaaatggaaatttgacatagtgagaacttgtctctacaaaaatgttttaaagtatcagccaggtgtggtggtgcccacctatagtcccaactacttggaggacgaggcgagaagatcacttgagcccgggagattgaggctgcagtgagctttgattgtgccactgtactccagcccggacaccaaaatgagaccctatctcaaaaaagtaataatcgtaaaatgaaaatggaaatttgataattgaaatagaaatgaaaaatgtattggatagtcttttttttttttttttttttttttttgagatggagtctcgctcttgttgcccaggctggagtgcagtggcgccatctcggctcaccacaacctctgcctccctggttcaagcaattcccctgcctcagcctcccgagtagctgggactacaggtgcgtgccaccacgcctggctaattttgtatttttagtagagacgaggcttttccatgttggtcagactggtctccaactcctgacctcaggttggcctcccaaagtgctgggattacaggcatgagccaccgtgcccgacctggtggatagtcttaatggcaaattagagctgtcaaaagaaagagtcagtgaacttcaaaatagatcaattgaaattgttcagtttgtagaacagtgagcaaaaggatttttaccaaatgaacagagcctccgtgacatgtaggacagtttcaaatggtttgacatgcatgtaactggaacactggaaggataaaagagtgagaatgaagcacatgaaagatagtttttaaaaatgaccaacatatttctctaatttaatttgaaaccataaatctttgatttacaaatcccggaaactaagtgaaaccaggcaggataaatacaaaaaataaaaaatcacaactagaaatatcataatctagtcgctggaaacaaaatatgtagagaaaaataaaagcagcctaagaaaaaaggcacagcacataaaggtaaactatgatagctgagtccttctcagaaacagtgaggacctgaagacaatggaacttcttttagggtactaaaaaaaaaaaaaaaaaaaaaattagccaaaaattctgtaaccagagaaaaagatcctttaaaaactaggattaaataaagacaatttcatataaacaaatatgaaaagaattcatctctagaaagcacgctacaagaaatgctaatgggtgttcttcaagctgaagggaaatgaatccagatgggaacatgaatctacaggaaggaatgaagaacaccagacatgggccgggcactgtggctcatgcctgtcatctcaacactttgagaggccaaggtaggaggatcgcttgagtccaggagttcgagaccagcctagacaacatgacaaaaccctgtttctacaaaaaaaaaaaaaaaaaagaaagaaatttttctttcttttgaggatagtggctcatacctttttttccaattacttgggatgccgagactgaggattcctgggcccaggacatggaggctgtagtgagccaagatcacaccactgcactctagcctcggtgacagagtgagactctgtccccccgccaaaaaaaaaaaagaaaacacggacatggtaaatctgttgatacatatagaaaatgtattttttcttttcagaattcccttaaaagacaactaaagctttaaagtaaaaataacatgatgagctggcatttataatatgtgtaaaagtgagagataggacaacagtatcccaaaatattaggaggtagaattgtaaggttgttaggttcgtgaagtagaaaatatgaggtgttggctgggcatggtggctcattctgtgatcccagtgctttgggaagctgagactggaggatcatttgagcccaggaatttgagtttacactgagctctgtttgtgccactgcacactagcatgattgacagagtaaaatcctgtctctaacaaaaaaaaaaaaaagaaaagaaaagagaggaaagagagaaagaaagaaaaaaattatgaagtgttagatgtgaagtagtacaatttctaatctaaatagactttgataaggtgcatattgttagctgtagagcaactaccagaataataacaagaaaaattttacaaaccccgaagagcgaccaggcaccatatctcatgcctgtaatcccagcactttgggaggccaaggcgggcagattacttgaggtcaggagtttgagaccagcttgggcaacacagtgaaacccccatctctactaaaaatacaaaaactggccgggtttggtggcgggtgcctgttatcccagctactcaggattctgaggcaggagaatcgcttgaacctgggaggtagaggttgcagtgagccaagacggtgccactgcactccagcctggacgacagaacgagactctgtcacaaaaaaaaaaaaaaaagaaagaaaaggaaaaaagaaaagaaaaaacacctgaagagctaatagaggaaataaaattcaatgctaaaaattatttcatttatccaaccaataaaggcagaaaaggaacaacaaatgaacaaagaacaggaacaacaaatgaataacttaaattcaaccatatcaatgtttatggtgaaatgaaatatgctaaacacaccaagtaaaggacagagatattagaatgggtgtattagaaaaaaaaaaaaaaaaaggaatgctcaattgtgtgctgtacataagacctatactatcataaacactggctggaattaaagaatggaaaaaggtagttcttggaaatagtaatcataagaaacctggcatagctatattaatatcagacaaaggagacttccagacaaggagtattcccagtgattaaaaaaaagggcatatcataaaaacaaagcagacaatacatctgaatgacataataatccttataaatatatatctaatagagctttaaaattcatgaaggacagactgacagaactaaaggtcaaacagatctgtggtcaccagtcatcactggggattttgacctctgttccttagaaactgatagaattagtcaataaacaaaagcaatcagaaatacagaagatctaaagactattaacttgacttatttagcatttatagaatactgtatctaacaactgaagaaaatacatgttttttaaagtgcatatggaagtttcacagaaacagaacatatgctgggccttaaaagtaagtctcagtaaatttcagaagactgagatatgttggagttgttctttaacaatagtagaattcagttagaagttaataagatacttagaaaatgtttggaaattagataacataattctaaataccatggcttagagaagaaggaatattaggaatcattttgaactgaatgaaaattcaaatgtgaaattttgtgtttcacagttgaataagtggttagaatgaaatgtgttttttttgttttttttttttttgagacagagtctcgctctgtcacccaggctggagtgcagtggccggatctcagctcactgcaagctccgcctcccgggttcacgccattctccggcctcagcctcccaagtagctgggactacaggcgcccgccacctcgcccggctagtttttttgtatttaatagagacggggtttcaccgtgtttgccaggatggtctcgatctcctgacctcgtgatctgcccgtctcggcctcccaaagtgctgggattacaggcttgagccaccgcgcccggcctagaatgaaatgtttacctttatatacctatattagaaaagaagaaaggttgaaattcattgatcttagtttctacactaaggtaccagaaaaacaagcagagcaaaccatagtaagtaggataactgaaatagtaaagataacagaaatcaaacacttagaagacagagaatcaacagagaaaattcacaaaattcataaccatggttatttaaagaattaaaaaattgataggtccctagcaaacagatcaagggaaaaaggaaggcacatgaattgccaatacttggagtgagagaggggttatcactccagtttctaaagacacttaaaaagagaatattttgagcaaccttataacgataaatttaataaatatattagacaaattctttgaaaaatacaatttattaaaactggctcaagaaggaatagaaaatggaacaggccgttttctataaaagaaattaaatttgtcatatggaaccaaaaagagcccaaatcgctaaggcagccctaagcaaaaagagcaaagctggaggcatcatgctacccaacttcaaactatactacaggactacagtaaccaaaacagcatggtagtggtagtaaaacagacacacagagcaaaggaacagaatagagaacccagaaataaggctttacacctacaactatctgctcttccaccaacctgacaaaaacaagcaatgggggaaaggattccgacaaaggtttaatatccagcatctatagggaatttaaacaaattaacaagaaaaaacaaccccattaaaaaatgggcaaaggacatgaacagacacttctcaaaagaagacatacatgtggctaatgagcataggaataaaagctcaaagtcactgatgattagataaaatgcaaatcaaaaccacaatgagataccatctcacgctagtcagaatggctgttattacaaagtcaaataacagatgctggtgaggttgcagagaaaaaggaactcttatacactctcggtgggagtataaattagttcaaccgttgtggaagacaatgtgtcgattcctcagagacctgaaaacaaatgcaatttgatccagcaatcccatccctaggtatatacccaaaggaatatcaattgttctgtcatatatacatcattaaatactactcagccgttaacagtaacaaaataatgttttttgcagcaacttggatggagctggaggccattattctaagtgaagtaacacaggagttaaaaaccaaaagccttatgttctcacttataagtgggagctaagctatgagtatgtaaaggcatgcaatcgactttagagactccaagggggtagatgagggaggatatggataaaaaactatatattaggtaccatgtatatatactactcagtcgatgggtgccctaaaatcttagaattcaccactatataactaattcttgtaacaaaaaaacacttataccccaaaagctatttgaaataaaacaagacacatgtacacctatgttcattgcagcactgttctcaataacaaagacttggaatcagcctaaatgcgcatcagtggtagactggataaagaaaatgtagtgtctgtacaccacggaatattgtgcagccataaaaaagaacaagatcatgtcttttataggaacatggacggagctagaggtcattatccttagcaaactaacgcgggaacaaaaccaaataccacatgttctcacaagtgggagctaaatggtggcaacacatgggcacatataggagaacagcggactctggggtatattggagggtggagggtgggagaagggagaggatcaggaaaaatgactaatgggtactagacgtaatacctgggcgatgaaataatctgtacaacaagccttcgtgacacaagtttacctatataacaaaccttcacatatgaccctgaactaaaaaattaagaaaaagtccaggcacggtgactcatgcttgtaatcccagcattttgggatgccgagttgggcagatcacaaggtcaggagatcaagaccatcctggctaacacggtgaaaccctatctctactaaaaatacaaaaaattagccgggcgcggtggcgggtgcctgtagtcatagctactcaggagactgaggcaggagaacggcgtgaacccaggaggcggagcttgcagtgagctgagattgcacgactacactccaggctgggcgacagagcgagactccgtctcaaaaaaaaaaaaaaaattaagaaacgaaaggaaaaataaattgaatttataatcaaaaacattcctacaaagaaaactccaggcccagatggctttactgttgaattctaccaaatgtgtaaacagtcttagagaaactcattcacaaaataaagagggtattatagaagtacttaccaagtcagcttagaattgtgaccctcgtgcctaaacttgacaaagacattacaaaagaataaattacacatcaatgtcactcatgaacgttgacataaaagtccctaacaaaaccgtagcaatttgaaatcaagataaagaaagctaatatatcacagcctggttggccttatttctagaatgcaaggtttggccagtatttaaaaatgaattaattaaactcactacctgaacaaaatacagaaaaaaatcatgtagtcacctgagaacattcagaaaaggcttttaataaaaggcaacactcatttatgataaaatgtcttagctgactagagatagaaggtaattcagctcaataaagagcatcatgaaaaatttacagctaacatcatacctaatgatgtaacctaaaccctgagattgcaaaagagataaggatgtctatacccccacccccgccattcaatactatattggagatcctagtaatgcaagaaaggaaggaaagaaaaagaataacattcaaaagaaaattctaaaacgtatgcattcataaatatggttgtttagggcattttaggcatagtttggggatactgcaagttttgttccagactactgaaataaagtgcatattgtaataaggcgagtcatacaaatgtattagtttcccagtgcttataaaagttatatgtaagcagggtggaatgggtcatgcctgtaatcccagcacttttgggccatggaaggtggattgcttgagcccgggagttcaggaccagcctgggcaacatagaccctgtctctacaaagaaagaaaataaatagctgggcatggtggcaacaccggtggtcccagctactggggaggtggaggtgggagggttgcttgagcccagaaagtcagggctgtagtgagctgtaatcacgtcactgcactccagcctgggtgataaagtgagaccttgtcttgcaaagaaaaagttatatgtacactatgctatagtctgttaagtgtgcaatatcattgtgtctaaaaaaatgtgcatactttaaaaatgctttatttaaaaaaaaattctcgcgatcatcttgagccttcagggagtcacgatctttttgctacaggagggtcttgcccctatcttgacggttgatggctgctggctgatcagagtggtggttgctgaaggtttgggcagctgtggcaatttcttaaaataaaacaataataaagttgccacatcaatggactcttcctttcacaaaagatttttctgaagcatgtgatgctgtttgatagcattttacccacagtagaacttctttcaaaattggagtcaatcctctcaatcttgatgctgctttaccggccgggcacggtggctcatgcctgtaatctcagcacttttgggaggccgaggcagacagatcacgaggtcaggagatcgagaccatcctggctaacacggtgaaaccctgtctctactaaaaatacagaaaaattagccgggtgaggcggtgggcgcctgtagtcccagctgctggggaggctgaagcaggagaatggcatggacccggaaggcagagcttgcagtgagctgagatcacgccactgcactccagcctgggtgacagagcaagactccgtctcaaaaaaaagaattctattggccaggcgcagtggctcgtgtctgtaatcccagcactttgggaggccaaggcaggtggatcacctgaggtcgggagttcgagaccagcctgaccaacatggagaaaccctatctctactaaaaattcaaaattagccgggtgtggtgtcgcatgcctgtaatcccagctactcaggaggctgaggcaggagaatcacttgaacccggagggcagaggttgtggtaagccaagatcacaccatcgcactccagcctgggcaacaagaacaaaattccatctcaggaagaaaaaaaaaagaaaattaattaggtatatttgttttcccatgtatgaggaagtctctggatttctgagtgtttctttttaacctgtctagggtgtggtggttttatttcataaaattgggagttgggagagaggtatttcttgttgagttcacagtattattgtattgtggtgagaaaacatagtctataaaaggaaagcacagggggcgtaaatacaactacagtcaagattttaaaaactatccactgacccgatgtactggcattgaactatgttgatttttgtcctcaggctggtgtcaagtgatgccatccttttgcgtgttcctaggtctgtttcttagatatttgaaaatgtttctcggaagtcctgatatccagcgtcccccaacagtagactttcactcaacatctgttaggccagactgagtcccatgccaagtccctgaagaaggaaagtggggttacctttcttggcttagtctaatcagcatctacctctgaggtttagagatagtctttgaggcactctgcgaagaaaagatacgtgaaaaacagctggaagcacaaaacgttggttaagcagccaagagtcttcagttgtctctgagttgctatctttcaatatgcctgggtatcagccaatttactggaagggagaaggaatgctggttgatctggagagtctgataattggcattctgttaggagaacctctgttacacttatttaaaggccctttaacacagttctagtatttctagtttttacaatgtgaagtcttcttaggtgaggacttgttttctcatctggttggtaatctttgatagctctgctttggtagctctgctgccgtggagctactttcctcgggagtcctgttccttcggagcagcttccagtttctctctggggacttagtacgttcagtctttctggacctgtttttatgtgaatttctgtgcttgggattctgtgtgtctctcatgcatcagtgagttctcgtgaataattcgtttcctacccatagcctaagagtctttgttgcttcattgggctagtaagtaaagtttttctaaaggtctccattttcacaggggtagtcaacctttgtgactttctttaactttatgcagaaaggttagttccggctcctcctgagccccgatcctgggatctccttgctaaggcttagaacccagttttttacctcctgctccctcgccccactcccataagctatttccacttaaactcgtcagctataactgaattctttctttgttattagcacttctcctggtttggctaaagctcaatacctaattattactttctttttaagaactatttttatgtgtttggagcaagaggggaggaacatgttgggtttcctcacaatatttatcgcaagtataggttctaatttaaactattttcagtctgttaggttgtttttttttctccttctctcctaatttttgtcagctgttatttttataatcattcttttcttcctgaagtcttcaaaatccatcagatggatttgattgttgctttttagatagagtatctgttgcaaagtttttgccattgcttatgagatgggatgaattacaactcttttaaacaacagttttctgtggaagggcagcagaaggcaatggtgaaaggtgtacttcctgctcttcatttctgtttctgaaatcttattttgttctcttgagtttccgtaagagttacttctgcttaaaacttctgcctttacccaaactttatagcgtcttctggaatagtttacttttccagtatactttaaaggaaaaaaaaaaccttctgttctcagcctgctcatgacatccagctcctgttgctttggctcagagttccattctacctcatggtaaacaccttcgtatctcattatatcttaaattctctaagctctaggagcagacttacagagggagcatactgtactgttcaaatgagccatgacagacttgggggtggaacttactgctgggaagtagaccaggtggtattaaaggggcttgttccatgaggcaattgctcaacccgttaatattgaagtagaaattggaggaataaacctctttcagttgctaatttcctgtggagataagacagtcacactgtgcttgtgtatttccatctctccatgtaaaactgtattggaaaacatttctttttatttctaggtctgaatttttgttgttgttgttttattttattggcagacttcatgtagctaaacccctccgtgcttcaatttaagatatcaggagatgagtgaaattgttacattattacgtagatgctgcagctctgcttgctagggatgaaatcctattgtatgaaataatatagtgtgaagctgtcagtaatttccagttgtagaagagggcctaatcagaaagttgtgggttttttttttttttttgagacagcacccggcccagaaagttttctgaccagacacatatacatatttcagtgggttaattactcaattttattgtaatttcatctgttagaaagtacccaaataattgcaaagtttatgtatataaacttttatggctacatcacaggcaaacaataggtgaactttggcatggttgtagttggggggtttcatatggagatactgtgggcacgtgccctcttcttccctgctggcattctgggaagtgctgacgggctccggggcaagtgaggccctggagactgatgatgacacaccagtgttcatttgtgcctcatctcttcgattactaggaagatagcggttttactaagactcagctgctgtcagtttctgtggattgattgtcttaaagggaaagataaatcaactttggttttttcctgaatatagctaatcagctcatttaattgtggaccaatcagtaaaagaataattgagtttagtaaatattgcgtaaaataagttctttgcggtttgaccctgggttgagctggcttgaattttctttcttttcgactccctgccgcccgctttgcggtgttgtatgagtgatgagtccacaggccccgtaaacatgttaggtgaggtgttcgttgtttattagtagttgggattaaatagaagttgcatattgaatttgagtgaagtgacttttctgcacagttaacttggatgtcattggtttgaaggagtttctttgttgcggctgcttctcgcctcctactttcagctgtgggtgcttcctttctgcatcctgctaaaaattgtcttgttttcactctcaaagcatgagacagttccagagctgtgtttggtttttattttaaactaataccagagcgcccctttagttagtcaccagtcactgtttaggtaggttgatgattcctttacgctacccaacttttttttattttaaattgagcatttttaacttgctttttaggtcagaggatcgatgtcctctgtggtattcctcctccatctaagtttcttaaagcagtattataaatagaggctttcaacctaaaaagtactgtgtatttcattgactagaagtgaactgaactgaagtgcaggctaataaaaagtaccaaatgagaatattatggtatctcattgcactctattgtagacgtaatgtagtgtgaacagtagtagctttgattcattgtaaagtcccatctgaatactgacaacgtagttcagactatcaggagataaacctcaaaggtcacatttatgtgaatggtcattgtgcatataagacattactttattattttaaaaatagcagtgttgctcttaagatagggcagtagctgccaaatagtaatgtttttgtagttgagtttctgtttcttcttcagctgttattattgttattattattatttgcatgaatggtagcagttactccacaggcaaatttcccttgaatcccagagtattgcaacagattagcagcaaataaagacctgagataaagaaaaaaaaatgcttttattcagttatattaaaatgaggacatgtcaaaaaactaaagcagtttatgttgttctgcatgcataaattgaaagaatacttgaaaattcttcaaacttgaatggtagacatcttacagctttctgaaaggaagtcagtgtctttgcagtaggatagagggtcccaacattacttggttctagcacaatcactaaatttttcgtgacttttaggccaaaataaatacttaacagtccctaatagtttgttatgttccaacagtttgtaatcatgtcaagaaataatagacatattagtaataataaattgaaagaaaatgttttaatttcttactacttactaatcaaatgtgtacttgttgggcatggcacagttttttaaaccttggaatcagattggccactgccaacttcatttcttgttccatactaatttctgtgcagaactgtgttgtgcttttagtcacagtgctgtggtctgaatggttatgtccccccagaattcgtatgtggaaattctaacccccaaggtggtgatatgaggagatgtggagcctttgggagtgattaggtcttgaagccggagttcttatgaatgggattagtgtccttgtaagagagaccccagagaactcatttgacccttccactgtgtgagaaaagctgtgagcagatgccatctgtgaaccagaaagtggactgtcaccagatactgaaccttacagcactttgattttagactttccagcctctggaactgtgagaagtaattttttgttgtttataagctacctcgtttatgatattttgttacagcagcttgaatagactaagatacacagcaaccatccaaaactcaatttcgaagagatggaatatcatgaacaataattttgcatgatgtcatattaaactgtgaaataccacaagctagtgatgtgcacactgtctcacagcactgtgtttctcaaaattcaaaagactctgcagcacccctgtgagttccctgaggtgctgcagtgcacagtttgggaactgtggtggtagtgtagatagtaagattatctaataataggtattgatggcatcttagtttagggataattattcgtatgtcacactataggggaagtgagtaaatcatatactaggttgttatcagaacgattatgaatttcttcacccacctgtagagagaatggcctatttttttactctgaccccaataagaaaagtattctgcaccttcccccttctctctccctttttgtctctcactctcactctaacagacacacacataatgaaataagtatttaacaaaacaatattcttattatgtgcattctgatgttttttttctttctttctttctttttttttttttaaatgtccccttaagacctactgaactgacgaaaactagttaaggtcacagactcgagggcctgacttgactttaaaatggccttcaccgtttcctatctatgtgactctaagcaagatatttaatctctcagtcactcagtttcctcatctatagaatgggaatttgtaatagtacctagtgctgaggggaatttttttttttttttttttttgaggcagagtctcgctctgtcacccaggctggagtgcagtggcgcaatctcagctcactgcaagctctgacgtccgggttcacgccattctcctgcctcagcctccccagtagctgggactacaggcgtccgcccccatgcctggctaattttttgagtttttagtaaagacagggtttcaccatgttagtgctgaggggattttaaggaagttaatacatacaaaacactttaaacagtttttttggtttgttttttttttttttttgaggaagagttttgctcttatctcccagactggagtgtagtgggacgatctcggctcactgcaacctctgcctcttcgtcagccttccaagtagctgggaatacaggtgcgcgccaccaggcccagctaatttttttgtatttttagtagagatggggttttaccatgttggccgggctagtctcgaactcctaacctcaggtgatctgcctgccttggcctcccaaagtgctgagattacaggcaggagccaccgcgcctggccatttaaacagttcttgatcagtagttactgctttatcactagactctcagtgaataatcagaggccaaaacatttgggaaattagagagatgcaagagttctgtgctttaaagggtgccacatgcagtcagaagacttttctgaatttctactcgtgggcagatagattgtggatcccttgccaaaggttttccgtatttatcctcttgaatctggatccagttgagtagtcaacaggggagtccaaatgagggagatgaaaatactatcattattactgacaaagctgattagaaaacatgactttatatttgcgcccaagtatcttcgctagtatatccctcctgaagtagacaggtctccccaccagcacagctgagtaactgccggcttcttactgcgtggcagagagtagaacggggtggaccttctgcgtaggcggccaggtctgaagagaggagagcagaaggggccgaactgagtgtgttcacccctttcttcaaaatctgccagtgatgtcactcacaagggagggaaacaggaaacacaggcacagaaatgtgaagaatgagaatgtcaccttaacaaagggaacattttatagggatacaggaggcccgtaatcaagttcgtgtttcgtaacttttagcagtgagctatcctttctggcatgaactttaaaaacagatgtactagggtttgaattctgcctgtgtcacttaattgcactggctcaggcatcctagaatttctaagagccgtaaaacagataaaactactttgcacgaaaaattgaccactgacttctctcccctgttctattgatacagcattaaatttattaatgtttgtttttgtcaaacttcagtagtgttagaggtatgagatcagccttagttgattagaggtatgagatcagccttagttgattagtaagaaagattttatttacctaagatagcaagagagatatgcctttgatctttgttatttatgggaaaataatttattaacctaatttttattgtcacttctaaatacatagttgtcctattaatggggacctttttttcctgtgagcatctgaaacagtcttttttttcatgtatgggaagtggtaatagtttttctcgtgtatcaggcaactaacaacttattttagaccagaaattcttagaaatggtacctatctagttggcataaaatttgcaagcgctattctgttgtttcctgaaaaagatgcagttgctttactcatagagttatcagttacttttctggctattttacttgaagtagccatgctttgtctttttttctgtggagatacatggctgaaagtaagtcttttcaccagctggataatatgaaatttgataaaatttgagtaatataaaaactttcccattggctttatatgattgaatttccactatgtaaaattaaactagttatttcttatgctacccaatatatagtttattatttgaaaactgtatccccatttttcctcaagaacatcattttgtcttttgcatctcagtgcaggggttggatagtgtaatttcttctcctagaaacccattttctgctgcttgtagctactatttctgttttttcatcaaccgctacaggaagatgtggggttcctgccatctctctgtaatcagtggtgtcgtcacataccccatatggactttgtgttttgaagttagtgctgctgacctgccccttcagtaccttgagcttgacctctagctttcagcagcaaaggcctcaaagaaaatcagttgccagagtcagtctgtttgcttgtgtcctcctaacccactgatccttgacattgtgttgtttctcaaagaagtaaagcaatttttttttttttttgagacagtcttactctgtcacccaggctggagtgcagtggcgggattttggctcactgcaaccacctcccgggttcgagcgattctcatgcctcagcctcccgagtagctgggattacaggcgcccaccaccacgcctggctaatttgtgtgtttttagtagaaatgggtttcaccatgttggtcaggctggtctcgaactcctgacctcaagtgttctgcccaccttgccctcccatagtgctgggattacaggcgtgagccaccacacccagccaaagcagttgttttaatatataagcatttaatatattgagttcggttgattcttacctcacttccaagataattgcttctgttaaattacattcatttttaggcttgagtcatccactatatttatgagttggtcagttctttcatgagttgagcttgtttttaaaacttttacttttaatgtccccttctgtttctactgcagccgctttcactgtaacatttatcatgttattcctggcagccagtcttcttaacgctcagttatgacttttgacaggtgacagcagtatcacttatgaccgtcttagttcatttttaatgaaaatccaaaagatgctcctattgcaataaaagcataagaaaatagtaatagaataaaggtttattctgttaataggcagtttggggctgctgcagtggctccacgataccaaatggtcctgggctctatctttcttttccactatccttagtgtatggccttcttcctcatgcttgcaaaatggtggcatacagaagcctttcatacatattcctgaatgtgaagaaagacagggaaaaagggacgtgccagctggttaaacaacaataaccatatcaaagacccgccgcctagatttcctcttcttgctggccagaactttgtagcatgcccacccagtgtacacagcaagctgcacaggagcctggaatatcagttttagttgagcagtgagtatatccagtgcaaaacccagatcccgcgagcaaaggatggtgaagagtaggtagatattaaacagagaaggatcagtgactacctcagctttcccgttcagaaacacgttataactccatatattgctttaattctgtctatcctagacagactcacaagactagaaccagacctttagaggcactaaccaaccactgaaaagaggctaatcacctcccatatgtaaatcaaattgttcaaaaaattgaaaaatatacgtgtaaagaccaaaaacattttgattgatcccatgacgtttcagtatttttctggaagtatttctctggaagtattaaatattctaaaattattttttagaatataaatattattttttagaatataaatattctaaaattattatcacagctcgtcaactcagactaaggcctttagtgctacactgatgtctactttctgtctctggtcactgtgctgctgtgatttaagacgccaccactaggaagagctggtgaaagatacacaggaaccctccagtcatctatgccacttccacaggagactaagattatttcacaacagagagtctagacgacactttaatcccacgtaaggttacaacatgttaaaagatgcgctagctatgaaagatgactgtgagtgtttaaaagacttttattttaaaatgaaacccttcctgtgctaagtttgatagctgtgctcctgcctaataagacctgacagcggaggaacgtggaaggaggcacagaggccacccagcctgggggctctgccccacccctccgcttgctctgtgtacacgtgtatatacctgtttgtccaagaaccctttaccttccgggtcggccaagtcccctatctgcagaaacacaaaaatgatcataagcatgactgctgatctttgcccgtgtgttaagaaaaatgagagccaccaccaccacaccaccagccttgcaaaccaagggccttgtggggcaggagtgacccaggttgcactgcagatgaagaggccaatttagagcaggtgaatgatctgcccaggggcgcacagccagtcggtggaagggcccagaggactcagctcccaagccagtggtgtttatgacacccttatttccccaacaaaagtcctacaagctatcaaaaccccaaaagtactcaggtctcttgtctgctacctaagtagtggcgggagtggccacctgggcattccgatccaacagttacagcctgagaggtctgccgtgaccaggccactccccaggcagcctggccccgtggaaaagggtctgcacaggctggctctgacctgccaggcagagctgtgagggtggccacagaagagaaattaccttcctgaggataatgtccaagaggccagacttctttagaaaaagtgcagcttcacgtgcccccattctccttgtatatgccgtatcgacctgagatgggagagcaagaggcaggataacagttcagcaaatgcagcagcaggtgaagcagcacccaccatgcggagtgtccggtgacagagaacagaaaaggacaaaaggccactcacctgggcttctactctgtactgtgcttcccagctcagtcacgcgctagttccatctaaaaagacatcggctaaacttaccttcttgtaataagattcacacaatggatttcccgtgggaatctgtaaacaaaaccacagatatcggtcaaaagtaaatgcaccccattagagaaaaaaaggttaccccctcaattttgtcatgaccaacatatatgacgatagtaagagtcaaaatgtatgtatttttaatataaatattctaaaaatattttcattttctaaaattatttttttattctaaaattatatttttgaggtacggtggctcatgcctgtaatcccaacactttgggaggccaagcagggcggatcccctgaggtcaggagttcgagaccagcctggccaacatggtgaaaccctgtctctaatacaaaaattagccgggcatggtggtaggcgcctgtaatcccagctacttgggaggctgaggcaggagaattgcttgaacctggaaggcggagtttgcagtgagcccgtatcacaccacagcactccagcctgggcaacagagtaagactctgtacaaaaaaataatagtaataaataaaatcgtttttttcttgtttgtgtgtggcagtggtaatgggctggagggtatgttgctgacatgctaacccacatccggtctacttcatcagggtttcctgttgtattagaaagatgagaaggttttgcttaataactccatagaggtgattcatttactgtagagccttaagaaaaatacttatcctgtctaggcctctgtttctccatccatgacatgagaacattgatcataatagacgagtaggcaaagaatataatcaagcaatttgcaaaactttacatgcagatgaccaataaaactataagaaaatattaagcctcacttatgacaaaagaagattaaatttaaattaaaagtccctttctaaaaatgtaacatagtagcagagatgtaatacccagtggcaataagaatataaagaaacaagtactttagtgtaaagatagtctgaggtagtaaaccagggcaacgaggtgtatttatcaaaggttttaaacaatgcgcaaaaacttttggccctgcgattctactttgaggaactttcctacctaagtttttgacaagcacacaatgattgaccctggtaaattgacataaggtatttttaactccagccagtttttttctttcctgcagggttttgtgtgaagctttctaagaagtaaatatgtaatagactgacaaagcttttttcttttagaaaatctaagccatgaacatttaatatgttttcgttttatattgtattaggaagataatggcagtcttttaaaaatgaaaataatttttttgttcatatctttatttttgtttcaatctgtctgtccattttggtcttgtctgttttacctctgggccatatctttactacaaccagtcttcctaactcttctcccaactttgagaagtagttttctaactatgtcaatgaagtatttccaaatgaaacttgcctaatggtctaatgccataaagacttgtgcttctgtcttctgtcttcattggattttagtcagtaaattttctttcttttttatttgtttatttatttattgagacggagtctcactctctctgctcactgcaacctccgcctcccagattcaagcaattcttcctcagcctgccaaatagctgggactgcaggtgtgcaccactacatttggctaattgtatttttagtataggtgggatttcaccatgttgtccaggctgatcttgaactcctgacctcaggtgatccaaccacctcagccttccaaagtgctgggattatagaagtgagccactgtgctcagcccatattcagaagttttctacagttgttttgttttgttgagatgaaaccttgctctgttgcccaggctggagcgcaatggtatgatcttggctcactgcaacctccacctcccaggttcaagccattctcctgcctcagcctcccaagtaggtgggattacaggcacccaccacacccagctaatttttgtatttttagtagagacaaggtttcaccatgttggccaggctgatctcgaactcctgacctcaggtgatccacactttgggaggccaagatgggtggatctacagtattttaaaacatgtagttatgcctcttcccaaatttattctcagacttatttttttactagttttatttctgaatggcacattagagagagagaaagccagagagagagagagagaggaaagaagagacaaggtgggacagttggtctaattgagttcatagaaagacagtgaagtgaatcatgggtgtttcatcactttacaaaactgataacaataatatcatttctagaaacgtgaatttgcagtttgaaatggtaaactttttttttttttgagacggagtcttactctgtcgcccaggctggagtgcagtggtgcgatctcagctcactgcaagctccgcctcccgggttcacaccattcccctgcctcagcctccccagcagctgggactacaggcgccgccacctcgcccggctaattttttatatttttagtagaaacggggtttcactgtattagccaggatggtctcaactcctaaccttgtgatctgcccgccttggcctcccaaagtgctgggtttacaggcttgagcgtccgcacctggccagtaaacatctttttatagctaatgggcacttttaggctaactgagcagtgaacactattaaatatatgaggagctttttaaaccaccttccacttaactcataactacttgccaggttgagactttcttttctctattaaccatgccaatttttgcccagagcatgctggaaaagcttctagattactgtcaaatataccaggcatggctcgttaacctgttgagttgtattattgctgaaaagttgtttattctagctattcttgacattttaattttttttttttattataagaaaccaatgacatacttatatgaaaaaatatctctgaaataaagcaaaatgttttggaaaaaggatgcaggtaagtcatttaaaaattgctgttgttgatgcaggagaggatttggagaaataggaatgcttttacactgttggtgggagtgtaaattagttcaatcattgtggaagacagcgtggcgattcctcaaggatctagaaccagaaataccatttgacccagcaatcccatttgacccagcaatcccattactgggtatatacccaaaggattataaatcattctgctataaagacacatgcacacatatgtttattgaggcactgttcacaatagcaaagacttggaaccaaaccaaatgcccatcagtggtagactggataaagaaaatgtgacacatggccaggcatggtggctcacgcctgtaattccagcactttgggaggccaaggcgggtggatcacctcaggtcaggagttcgagaccagcttggccaacatggtgaaaccccgtttctactaaaaataccaaaaattatccgggcatactggcggacacctgtaatcccagctactcaggaggctgagacaggagaatcacttgaatccaggaggcagaggttgcagtgagctgagatcatgccattgtactccagcctgggcaacaagagagaaactctgtctcaaaaatgaaaaaaaaaaaaaagaaagaaaacgtggcacatacacactatggaatactgtgcagtcataaaaaaggatgagttcatgtcttttgcaaggacatggatgaagctggaaaccatcattctcaacaaactaacacaggaacagaaaaccaagcaccacatgttctcactcataagtgggagttgaacaatgagaacacatggacacaaggaggagaacatcacacactggggcctgtctggggatcaggggctaggggagggagagcattaggagaaatacctaatgtagatgatgggttgatcggtgcagcaaaccaccatagcacgtgtctatgtaacaaacctgcacgttctgcacgtgtatcccagaacttaaagtataattttttaaaaatccaaaaaaattactgctgttaaattagatgacagatagttactgaatatcggaagactttttcttaaagtttgaaattggcactggatttcaaatgtctacatactggctagccccactttcacaaaaccagaactgaaaaggatgtgaaaaagacaatactgagcctaagtcatcagattatatggtgatctttggatctcgtctacatgaaaaaccagcaaagcagcttcaaagcagcaagacacttctccgtatactttttttgttctttaagaaatgttttcgttaatcagctagcagacttttgagtgtcacataaaagggcttcttctatagtttctcataaataatttgctgattctgggaactctaaaaggtaaatattttatatagcatgtgtatattgtaaattatttataaaaatgtttcaaaagacctaattctgaaatagtaaataactaaaaaattacaaaaactattctcaaatagtaaataagtatatatgagctttcaagttagaactaaaatttccatgatgtggtatcttttaagatttatttatcaaggaatattgtaatttgggaggattttttaaaagcagattttattttttctgcccttaacaaaaactaattctgagccttggggaatcagggcagctgcatcatgatatgacttgcctggggtttggtattttgctgagatacctgccagctggaattagaaccctatgggtataactagggtagacttaattattggcttactgtatttaaatcaaaatgaaaagctcatacaaaattttgtacccgtactctgaaaaaatgtggaactgtttttggactaaaattttatagcttttgtggctaatgaggcatgaaataaattggcaagctccaactcttcagagtacagtggtgcagtgtgcattttctaattcccagcccctgggattccagcaaaggtcacaaattaaacaaagtcaggattaatcaagactataatcaaataaaactcaatcattaatcctcttctgagttacaatagagtgattgtgtaattgtgtgagcagcactggagagggcccttttgtagtgcgtaggaaaatcaacattaaggtgtcaaacagaaaaatgaaaccctgcaggtgaagctgtctctggagccaagagaaactggcagtttatgcagagttgcaagtgaacctttggagtattgaaggggtgttggcactgagctgcagagcatgtgggtctctcagtggggcctccacagagatgagtgtatgggctgcagcaggccctgtttgctgggaaactcagtgtttgggtgcagcagctccaagcaacagtctctccaagttaactgccaaaaatttactgtgtaattctcagctctttgtaattttgaagaagaggttctggaaaagcatttcctctgtgggagtaattatgtgtcagaaaatgccattccccaataaagggggaaggttcacaaagcacagagctttggcctgtttgttccatgttcctgacttctgaactgatgctggctttatgatagctgtcttattatttctgctattttatgttctgtagtgatattttcttcatttctcatcccttcgtctcaagtcagtgtcagttttattgccagtttttaaaagtcagcagtgatactctccagttctgctgagagtgaaactttaagaataaattttgattttaattcatcccatattatatgtgagtatattttttatgtttgctttaaggatagtatttacctctatttgttagctttctgctttccttcataaaccaaattgaaaaattctcattcactcacccccatctctaatttggtaactgatttgaaagccccaaagcatgtgcctgttatcacatgattcagtttgagtttctgttttacacaatttgtttcttacattgctttttcctatttatgtactaagctctctgtatatgcaggatactgttaggtactatgtgagatatttattattttctttcaagtaaataaacaaccaatatccatgcatagctggtcagtcccaaacgtttacattactaaaatatcacttgggttattttattagcaagactttcttgtaatgatgtattatttcagattttgtctttccatttaggctcatatatgttacattttggtatcattattgaaacaaattcatgaattgagttcatcattagaaaatgaaggccttagaattttggtaattgttttggaccatcacaaaaatgtgcttggcatatttaaattctgtattttttcccttacctgtaatatcttttcaaagtgtctaaagctgtgatagaaatggaatagcacatagaatacttgtgtgtgtgtttgtatgccggaggggtcttatttttaccttttgtttttctgattttatacatacaatgttagatatattgttctgcaattaatatttcagtggaagaatattcatggtcattttttaatgtcagcataaaggtctgctgtattctgtttaacaactgctttgtgtcccagtgtatagatattgcattattgatttaatcctttcttggttgaaggttatttaggttatttccagttgtgtaatattgcagacaatactgtaaagaatatcattatacttgcatcttttcacatatgtaagcatatttttctaggatagataatggaattgctggttcaaaacataatatggcatattttatgttgaaaactgttgctcaagcacttttataaaaggctctgccccacatgtgctctcacccaagtgtgtgtgagagttgcatttccgtacattgttaggtgtagtggatactttccaccttttaaattttcgctgacttatttttatatttgagaaatctttttacaccgttacttactttcttctctccagcagagaagtattccatagtattacatttaattagtcatccattcagttacttctaacagtttgccattacatatgatgctacaaaatcttaacaaatttgtaatgcaaaattttcataagtataagactaaccttattacaaaagtcattttacatgtatgcaagtatgtctgcaggataaattctaaaatggacagagggagtatgtattcgtaattctagttgatagtgggttttttgtttgtttgtttgttttttgttttttttttttttttttttttgagacgaagtctcgctctgtcgcccaggctggagtgcagtggcgtgatctctgctcactgcaagctccgccccccaggttcacaccattctcctgcctcagcctccggagtaactgggactacaggcgccgccaccacacccggctaagtttttttgtatttttagtagagacggggtttcaccattttagccaggatggtctcgatctgctgacctcgtgatccgcctgcctcggcctcccaaagtgctggggttacaggcgtgagccgccacgcctggcctctagttgatagtgttaaatgaaaaaggaagatggaaaacagtatgctaccatttgtttacaaggggaagggtataagaatatccacgtgcaggcatacacgttaacatggtgagtgcagaggaaaatgagctttcaagttagaactaacactgtgacttaggtcacaacaggacataaacatttaatttactctgagcctcagtttccacatgtatgtaaatgaagctagtaaatgcctgtttgatagtattatgagaattaaatgcaaagttgtatgtgaaattatgtgacatcgtggccagtatatgatacatgtagtaaataagttcttttagatttctttcattctgccaaagttatttctgtaatctgaaatccctgagaggttctatttagagagagaaaagttagtcatggaacgtctgttatctagtcttctctttttaaatgtgaatatggaggcccaagtgacccatgtgttttactgggaaggaggccattaaccctggcttgattttgacactttaaaaaaaaaaaaaaaaaagctaaagcagcaagacagtgactttaaaagaattcataaaaatgttaccagacagtggaaaaatgaacatgagtaggaaagtgatatgtctaaaaatgagtatagaggccaggcacagtggctcacacctgtaatcccagcactttgggaggccgaggcaggcagatcacaaggtcaggagtttgaggccggcctgaccaatctggtgaaaccctgtctctactaaaaatacaaaagttagccgggcgtggtggtggcatctgtagtcccagctacttaggagactgaggcaggagaatcacgtgaagccaggaggcggaagctgcagtaagctgagatcacgccactgcactccagcctgggcgacagagcgagactctgtctccaggggaaaaaaaaaaaaaagagtgtagaatagaggtggtatagtacttcagtgaggaaaacacctactcagaagctatggcttctgcaagcagtccttaagccaggttcatacgttaccaggcatgtgtgcatactcttgaattggggggtgtgtgtgtgtaggtaagagaactagatctgcttataagccagtgcagtttagccagtttagcttctgggtaattcctacagaaataaattttgaattactgaaacacacacacacagcgtgcaataatatcaactctcttaaataacaagtacatgttatcactaacagtgtttttaaatgtctagtgttccttccagatttactccttcacctttcccttccaagtcatttgaatcacaaagacttcataaaagttatcttgtcaaagatgtcaaattagaaaagactgctaaaaagtttgttcctagcaatttctgttgacatccaagctgcccttgagcatagttaccaacctaaaagaactgaagaaaccctgagtgcaatttttttctagtgcaattcttttctttcttttttcctttttgctcttgctaacattttgcatattttatactaatttttctctgtatcagtttgcttggatatgcttcagattacccagtcctctcttacctgataactttttcccacttcagatagtcagcatttgtaacagataagttgtttactaacacaaatatctgtgtagttctgaaagcccctcttttttttttttttttttttaatttaacacggagtctcgctctgtcgccaggctggagcgcagtagcatgatcgcggctcaccgcaacctccgcctcccgagctcaagcaattatcctgcctcagcctcccgagtagctgggattacaggtgcgcaccaccacgcccagctaatttttttttgcatttttagtagagacagggagggtttcaccatgttggccaggatggtctcgatctcctgacctcatgatccgcccgcctcggcctcccaaagtgctgggattacaggcgtgagccaccgcgcccggtctgaaagcccctctttttacatttactgctgaaaagagcagagtgaaggtgattgtaggtgccaggattagattgacttgataaactgtttaatctgattgttctgtagaccttcctctgaaatgttacgattcatattcagaaacatatgtaaacactgtagcttattctaaagttaatatagtatctacttttcttatagatttttggatgacctttattcaaattcagtaaagcatctgtataatgtatacacacacactacatttctatatttctgaaaaaatgttttatgaaatacctttccagtctacgtgcagaacattcaggtattgtttcatttgttttaatacagttagaactgcgctgaattaatggatactactatgttctttactttatcacaatttctgctgaccagtatttctattgttaataactctttgaagatgtaacttcagtggttttcaagtattttccctataaggtcagcctgcatataggttggttttctgtgaatattatagtttttgcatgtggactacaacatacacaattatggagcaggtgtgcaatttcctgtttcccattctacctacgtggtatagaagaactattcaatgtatataacattcaaaaatacttttacaaaacagattccagtatgaaacaggtccttgctgtcaccactgaatttgtatcttcatgatcgttctagcttttattctcttaatggcctcctaattggtcttcttgtcccattgtgataaattcttcacgttgcctgccaaaattactggcataaaattcaggtgtgctgaatctgccatgtaaacttcttctgtgttcccatcactcccgtcatcattctcacccaaaaaacaaataaataataaagaaataagtgtgttttcttgatattcatatacacccctcatgctgcgtccctgctttctgctacccctgcgtgtaatggcagttcacttattctcactgctgtgtagtattccactctctgactatactacagtttatccattcaaccacaaacaaatttgagttgctgcggtttggacataatacagatagaccacattatgttttatttgcctcttatagtattttccaacagattctgagcttattgacagcaggttttttatatctttgtaactttgatttttagtgcattaatagcatagaggtttttttgaaagaatagagggaaagagaagggaggttactctagtgtaataaattagacaatacccactgccattctcagaacggtaataaaaaaaaattgccctgtttctcagactctttactgtggtttatgagtttatgttcacttataggcctttgtaatggaaaagttaactctagtaaaaagtagggatttgtttaaacagcaacttttccatattttaaccaaattctcccattacttattatgaccattgaacacatttttatttctaacgtagaagcaaagttggctacatgaaatcagtggtagagtattcacatagaaaattaacctcttacagttgctggaagaatagtaacagctgtgatcagacctttacctttccgaaccttctatctcaagaatccactaggagtgaaatttatcttaaaattggcagaagagaatcctagtcatgtgaagtgtaacctgagggagtaaagaattgtgaattctaatttcttgtttggatccggttataaatttggtctttatttacccacaatttttttacatgtcctttttcatgactttgtgatgttttgatggaagactggtagattcctcagatattttgtcctagacttaggacaagtttcttgatatgcagcttcattgctgcttttctttttttttttttttttttttgagacagaggctcactctcttgcccaggctggagtgcaggggcgcgatctcggctcactgcaagctccgcctcctgggttcatgccattctcttgcctcagcctcccaagtagctgggactacaggtgcccgccacctcgcccggctcatttttttgtattgttagtagagatggagttttaccatgttagccacatggcctcgatctcctgacctcatgatccgcccgcctcggcctcccattgtgctgggattacaggcgtgaaacaccacacctgcctcattgctgctgcttttctaaaccagaagcaaaatgaggaagtggcccctgtcagatcatggtcactctaataggaagcagtattgattaatggggtggaaaatcaaagtttgtttttatgggatacattttagaaacaagtacagttaatcctcattatttgtggatttcgtatttgtgaattcaccttgttgctaacatgtatttgtaatgctcatggtattttcagtcattcacagacaggggcagagcagcaaaaacttttgagtccctcaacgttcatgttcccagctgcagtcaaacaaggcgatgggccaggtgcgggggctcaagcctgtaatcccagcactttgcaaggccaaggcagatggatcacttgagatcaggagttcgagaccagattggccatcatggtgaaacgccgtctctactaaaaattcaaaaacccgtcaggtgtggtggtgcacgcctgtagtctcagctactcaggaggctgaggcaggagaattgcttaaacctgtatggtggaggttgcagcagtcacaccactgcactccagcctgggcgacacggtgagccttcgtctcaaacaaacaaacaaaaccaaggtgatgctctgccatcttatttcagctctcctgcggtaatccagtgtcctttttatggtctgtttagcagcacattttcacatacttcatatttgcatgttttgatggtgatttccctgtttaaaaaatggcccccaagcatcgtgctgaagggctaatcttttcctaagcacaagaaggctgtgatatgtgccttacagggaaaatactggtattaaatacgcttctttcaggcatgagttatagtgctgctggctgtgatttcaaatgtatcaaatgtatgtattttatatacacatatacacacatatattaaataagatgcttttaaacagaaacacacataaaacaaggtcatgcattgattgaatgacagcaatgttgtggcaagtggcttccaggaacctaatcccgtgtttcccctgggaccagtggtgcagcattcgctaaatgcggtgttcacggctgttttatgtcacatcgctgtcgaggatagggagcatcgatggcacttgattgcctcttacttccggtactgtaagccaggtttattcttattttctcagtgtcaggttttctccagctgcatttttttctctatattctttttttttttgctctttattgtgccagatgtgtcacaggtatttcttgtaaaggtagcaattgcctgttgtgttcctacaatgtggagcctgcttgtcagtgatgcttttatttaatcaattatacatagagttgtcagcatggaaagtgcagcttctgttttgaattatgttttacttctgagtataatttaaaggcagaatggcttcactcctagaaacctgagatctctaaagcttgttctcctcctgacgaatgttctctttgggctcttcaaatagagtatcttactcatggctttaggtgatatactgggaaagcatgccgttgctttagaaggctttataaataatacttgagtgttcaatatacgaatgtttggctttcataaccgtttcctccatctcttctataagtttattgaattcactgtacacatctacacagcaagaagcatttatctccctttatgctaataaaattaagcaaaagacaaagttactcccaagttcatagcatattccttgaaagggatgattctaagaacaaacagggatcaatgcattacatctctagaatacaggaaggagtcactaccttcgttttaaaaatgaggaaatagagatggaaactttccatctttccatgccgtgttcggcagtggtgatgtgttttattcccactaatcgaggcgtcctctgtgttttgatgctttgagaagtagtcatctgcttttcagtttgtgagagtagattaagtgtccttgtgctcacgcaggattgtatacttaaatgataatatatctcactgatgcgagtgaggaaaccagtagaacttagatcccatactgttaaagtctttgatgcttgaattatatatagggtttagaataatgggaattactttttttttttttttttttgagacagagtctcgctctgatgcccaggctagagtgcagtggcgcaatctcggctcactgcaagctccacctctcgggttcacaccattctcctgcttcagcctccaaagtagctgggattacaggcgcccgtcaccacacctggctaatttttttgtatttttagtagagacggggtttcaccatagccaggatggtctcgatctcctgacctcgtgatctgctcacctcaacctcccgaagtgctgggattacagacatgagccaccgcacccagctgggaatttctaatctatacctgagagaaaatatttaaccagagatgccacttttttcagaatgaaatttcagaatgtgttccctttcaaaagttaagaggcggcccagtgtcatgtatttggttctcgttaagaggcagcccagtgtcatgtatttggttctcgttctgtgtggctacttggtagcatttgccactctactaaatactctttttaaaatgttttcttgaaactggttcctcccttggattatgtgttacctcactctcatatttttcgtcaactattccttttaatcctttggaaatggccctttttaaaatgaatcatcattatatattttagttcattgtttaaaagtctgtttctcctatttaactgtgcattgtttcttttttgttgttgttgtttgtttttttgagatggagtttcactcttgttgcccaggctggagtacagtggcgcgatctcagctcaccgcaacctccgtctccccgtttcaagcaattatcctgcctcagactcccgagtagctgggattacaggcgtgtgccactacgcctggctaattttgtatttttagtagagatggcgtttctccatgttggtcaggcttgtctcaaactcctgacctcaggtgatctgccctcctcggcctcccaaagtgctgggattacaagcctgagccactgcacccagcccattgtttcttatctttttacctcccaatatctagaacatattgattatgatatagtagatgctttgtaaatgtttatggaagtaaactatagccattccttaaatgctggtgttccccttccagcctgaggttgctcatctcccatatactggttcaccttgtacatttttttctttcttatactaactactcagaagttatgttagagagggggtctctgaaactagactgcctgggttcagattccagctctaccagtttctaaccatgtaagcttgtcaagataatactagaaatattttcatctctatttccttatttttaaagtgaagataataaaatctccttcctgtagtctaaaaatgtaatgcattgatccccgtttgttcttagcatcatgcctggcatttaggaagcccttaatcaatgtcagataatagtgctgttttttttcttcttctccctcaactgccatgtatgtatctgtaacttccaaacctgttatcttgaagctctctggacttacattttcatatggccattgggcatttttagataagtgctctacagcaattttgaactaaaacttattatttctgcctgtgcatgtgtcctgccttctatatttcctaccttagataatggtattggctgcgcacagtggctctcatgcctataatcccagttctttggaggcccaggcaggaggatcacttgagtccaggagttcaagaccagcctgagcaacatagcaagtccccatctctacaaaaaaataaataattaggcccagcattgtacctcacgcctgtaatcccagcactttgggaggtcaaggcaagagaatatcttgagcccaggagttccataccagcctgggcaacatactgagaccctgtctctacaaaaaaataaattagccaaacatggtagtgcatgcctgtggtcctcgctactcaggaggctgaggtgggaggatctcttgaaacctgggcggtctgcagtgagcaatgatcatgccatcacactgcaacctgcggtgacagagcaagaccctgtctcaaaaataaaaattaggcacggtagcacacacgtgtaatttcaactattcaggacgctaaagcaggaggattgtttgagtccaggagctcaaggctgaagtgagctctggttgtgccaccgcgctccagcctggatgacacagcgagaccatgtctctgaaaaaaataacaacaatagcaatagtgtctcccgtgtactctcagaaatgtcattcgctagtttattctttgtccgaggctttctgcctttgtttctcctcccacttccccaaaaagagatttaaagtcctcactcctgcttttcatgattttccaggacactcacgccctttactcctcatccatctgtcctggagtctcactagatgtctcgaaactgtcttgaaactgtcctctgctgttatcaggctccatctcaaaaaaagaagaggcactaacgccacccagttccctaaacttgaaaactttgattcctactcctgaccacccctccttgcccctgcagctcatcccttctctggcctcactaggccctgctcaatgtgttcctagcccgtctttctagctcctcctcctttttccttttctttccttctctccctccccttactgttgcaccatatacacatacatcctaaacgagatgatttttgacctcttgtggtttgatacgtcttgctggaattggggccactgcagtatcaatgaggaagtaatgatgtttactgataatgaaagcattatcctttccagatttgttaattcatttaacaaacttaaatttaatatttattatttattagacactgctgggtgacaagagaagcacaataatgcaaagataagtaaaagcctgagaacaatagagaagacaggcccgaaaactaatgtaagatagtagctttttttttttttttttttttgagacagagtcttgctctgtcacccaggctggagtgcaatggcatgatcttggctcactacaacctctgcctcctgggttcaagcaattctcctgcctcagtctccccagtagctaggattatgccaccacacccagctaatttttgtatttttaatagagatagggtttcaccatgttggccaggctggtcttgaactcctgacctcgtgatccacccacctcggccttccaaagtgctgcaattacaggcatgagccaccgcgcctggctgataatgtcttataaaggtgtgtgtgacatgctgtatggaaggtcaaaggaaaaatcagctcagtgggagtttggaggggaaagtcacagaggaggtggcagttgagtagcattttgaagattaagattttgccagtagagaagaggaagaaatacagtctggattggccagcatggtaattgcatggaggaagttacagtacttggtgaaaacagactacgcttaaaagtcaaggacattttttctgtatggatgcatgaggaatggcatgccaggcacatcttcagccttcctaaaggcatcgacgtttgctggcagtagcacgtaggtcattttgactggagtgaggatgaatgtattagggttctcgagagacagaactaataggatatatgtatgtatgaaaagtttatagaggagaattgactcacatgatcacaaggtgaagtcccacaatcggcgtctgcaagccgaggagcaaggaagccaggagtggctcagtccaagtccaaaggcctcaaaagtagggaagccaacagtgcagccttcggtctgtggctgaatgccttagtacccccggcaaaccactggtgtaagtctaagagtccagaggcagaagaacctggagtctgatgcccgagggcaggaagcatccagcacgggagaaagatgaaaaccggaagactcactgagccactgtatcccccttcttctgcctcctttattctggccatgctggcagccgactggatggtgcccacccacactgagggtgggtcttcctctcccagtccaagtgttaatctcctctggcaccaccctcatagacacacccaggaacagtactttaccagctatctgggcatccttcagtccagtcaaattgacacctaatattaaacatcacaatgaaattagaagggggagtggaaactggactatgaagacattcatatgtgcttccaaagattttggtgtttttttctatctttggagcctttgttcaaggatgtgaaaatataaagtttgtatttcataggagtatcactgtggcaacaatataagaactaaatgagggaggttagtgactgggggcaggagaccctctcagggagctggcacagagaatgccagtagaagaatcttgatggcaatagggatggcaaatctctaaccagcaaaaccactgagaattaaggctacaggtacctttgggggccaagaggcaattaatactttattatggaattcagagaaaaatagagataagacacgaagtctgctcagctgtctgtcataaaagtgtgagcttggtggccaacccagcctggctccgttctctgtcctcagtcaccccatccccactcccctggtggcctgactcccactccttggtggccccatcccctagctcctcacgatatggtttttacttctctggatttaataaaaacttcaccagtttaaaaaaaagaaatgtgtgatcttgggcaaatttgtctttttgaaccaagttttatcacttaaaatgagcataataattcataagaatgctgtaaacataaaatgagtattattaactaagaatgtacagtagatagtaggctgtcactacgtgctagttttccttcttcctttccattctcttagtttacatttaaggaaactgatattcagaatgactaagtgatctgtgcatagttaaaaggccaatttagtgatagaactgagactggatccattactttgattacaactggattctttccattatgccaagcagcatccatagtcatttgttttcatgtgtacaattttctttgagaaaaaatgagcagaaactatcagttcatctttcttcaatcctgataaaatctagcacttacagaaattgataagaagtaagcatttattacataaacccatgccagcgaggtggatgttgagttctagtataaacatctttaataatgataattccataattctcagctgtttcttttagattgacctcttctcacttgataacattttccaattctaagctctttatcctgatggaaatctgatgtaacttgtctcagtaatcatttttccattttgagcatgcttatattttctaaacttaacttttaacttggttttccagcttggcaaccttaatttgtccattttagaacaaccaaaatattcttgattttgctggattaattcagttatctcaaattatctctgacttcctttttcacacccgattttccttagtttcgttgatcaaagattaataagagtttgtatgccgtaacagtggatgatacaaagaaaactgtgttttaggaattgggaaacctactttctgttacatctctcttcttattgccaagctggttcctcaccatgataggaaaaattatgtttgtaatcttatgtcttataaacagggctcaagttggtatggactatatattttgtggggaattaattatgtgactattcaacatttgacaaataattttggacgtaagtgtgcaatgtctaaaacacgaataattctaattttaatgtcaacgcacttgatgagttgaagtggtgcttgctggtaatagaagagaagagcctgcaaccaaaggtattgtgttatataaaattacatgtgatttgttgtgccgtcactttaaataagctttcccatcagccaatgtaagatattattagttaacatggaaaataacaacttcttacatttacatattgcagtttttcaaagcacttttgtacacatgtggtatctatataaattatatttcagaataaagaaatggtcactgtctataattcttatactaccacaccatttgaaaaaggccacagagatttattactctgtgagttttgtgaatattgagactcaaatgctatatttgtacaaggaaatcacaaatcatatctagaatacattcacttacatattatacctagagttcattttctcattgttcttttaagttttttctctgagtgtgggtaggtaaagtatagcaaatttgttgcagaaaattaactatgaccacattttactcagggaaaaattaaaaacttgaagccacattccaaaattaggaaaatattttgcttagaaggaatgattattctttgtttttgtcttttcaatttttttcttttaaatgtgcaacatgaaactactccttaccttgaaagctgtgtggctgattgttgcggcttcccaacatcttcaccctttttacccgaatttcacctctgctgttttaccttctaagctgtgaaccttgtcatcctgtttgaactacgcctgccctcccgcctcctgttattagcagtacatcaaagattggtcagtggtcttgtctccctgctaatgtatatcttgatgttcttgaacagtatttaaacagtgcccctttggaggaatatctgatgtcagtcatttcctattctgagttaagttaattgatctgataaattccaatgagcaagtgaatatagtgggtttaaaacgtatccatctattctggatttgctgttgctctggagaaggcaaaaaggccaggaattagtgagtggcttagtcttctctcatcattggcagctgacagacctactgatgaggtgataatgaactcagaagtccacccgaggagcagctgggtgggaaaagaacccagacagcaggcaggcctcactgtggagcctgccaagatatttgcctcttcatagaattcgtttcaaggagtttagcaggtagactttgctggatgcatgtcagaagtgtaacttatcattcatggataccaaagacaaatacacattttatttctctcaacataacaagccagaggcctcagtctcagacggtcactggggtaatccagtcagagaggaagcatctgaaacagggcttgaatacaaagttcatttttaaaaataactctttccttctttccattaaaataaatatccagtacataaggtatgacagattagactttccagaattatttgctactcctgtttatttgatttctagaatgttgccnnnnnnnnnnnnnnnnnnnnnnnnnnnnnnnnnnnnnnnnnnnnnnnnnnnnnnnnnnnnnnnnnnnnnnnnnnnnnnnnnnnnnnnnnnnnnnnnnnnnnnnnnnnnnnnnnnnnnnnnnnnnnnnnnnnnnnnnnnnnnnnnnnnnnnnnnnnnnnnnnnnnnnnnnnnnnnnnnnnnnnnnnnnnnnnnnnnnnnnnnnnnnnnnnnnnnnnnnnnnnnnnnnnnnnnnnnnnnnnnnnnnnnnnnnnnnnnnnnnnnnnnnnnnnnnnnnnnnnnnnnnnnnnnnnnnnnnnnnnnnnnnnnnnnnnnnnnnnnnnnnnnnnnnnnnnnnnnnnnnnnnnnnnnnnnnnnnnnnnnnnnnnnnnnnnnnnnnnnnnnnnnnnnnnnnnnnnnnnnnnnnnnnnnnnnnnnnnnnnnnnnnnnnnnnnnnnnnnnnnnnnnnnnnnnnnnnnnnnnnnnnnnnnnnnnnnnnnnnnnnnnnnnnnnnnnnnnnnnnnnnnnnnnnnnnnnnnnnnnnnnnnnnnnnnnnnnnnnnnnnnnnnnnnnnnnnnnnnnnnnnnnnnnnnnnnnnnnnnnnnnnnnnnnnnnnnnnnnnnnnnnnnnnnnnnnnnnnnnnnnnnnnnnnnnnnnnnnnnnnnnnnnnnnnnnnnnnnnnnnnnnnnnnnnnnnnnnnnnnnnnnnnnnnnnnnnnnnnnnnnnnnnnnnnnnnnnnnnnnnnnnnnnnnnnnnnnnnnnnnnnnnnnnnnnnnnnnnnnnnnnnnnnnnnnnnnnnnnnnnnnnnnnnnnnnnnnnnnnnnnnnnnnnnnnnnnnnnnnnnnnnnnnnnnnnnnnnnnnnnnnnnnnnnnnnnnnnnnnnnnnnnnnnnnnnnnnnnnnnnnnnnnnnnnnnnnnnnnnnnnnnnnnnnnnnnnnnnnnnnnnnnnnnnnnnnnnnnnnnnnnnnnnnnnnnnnnnnnnnnnnnnnnnnnnnnnnnnnnnnnnnnnnnnnnccaggctggagtgcagtggccggatctcagctcactgcaagctccgcctcccgggtttacgccgttctcctgcctcagcctcccgagtagctgggactacaggcgcccgccacctcgcccagctagttttttgtattttttagtagagacggggtttcaccgtgttagccaggatggtctcgatctcctgacctcgtgatccgcccgtctcggcctcccagagtgctgggaaaatcttccaattttgtttccagttatgaatgttggtgaatctttattttccaaattcagtttatgcttccactgcccatgtttcttcaggtatcgtagaagtgaattaagcattttcaagtccgttcgtccccacttcacgttggtagtcacccctcatacacatatattttgtagcccacacaggaagcaacttaatgtgaatgtataaaatgttttaagttaattactggaagtgtgttaaacatagaatattggtgagtttttaaagtctctaaactttaaaaataactgtttgtagaaaaaaattgttgtgactcaacgttccttatgtaaagacttgtcttttgggtcgtgttaaagaagctcgtgagcttccctttttcagttttaggcagaacatggactttgagacgtttaaaacattctgttattcccgctgtctttaagctgtagtgaaatggatcagtgtgctgggagtctgtattgctgaactgtcagggcctttcttgtttagtttccctcgatgataaatttcagggaacccagagtgtactacgtttaaccagtttcgaggctgaaaaaatgataagggtttgtgtccagaggtttgggtaacattgttaatcgtgccaagtatccactgagtttggctttattctttatgctgtttaactggcattttctctgctgtaagaaaacagtccttaggagccacgatgactgattttattggtaaacatatgaatgaggcatgtttcataaaactctataaatttaatattagaagcttgagaagacagttcagtaaagataattttatatatattttaactttctttgattccattcactttttaaattagatatttcagattgtaattcttagaatttgccataccgtttactcctctttcttgaaaaacaaatagaataaacaaaagtgtttagacattctaaagagtaatctgaggattgtagttttgactccgttctttcacgagtatagtttctcttttctcttttgtaatacaagatacacaccagtttgtctattcattccgttttgcttctccaaacctgtttacatctttgtttgtgactcatttctttatttgatcattagttgttaccgttgtatacagtctctttagtttgatttttgctgaagtcagatgaacctcattggtttcggggatgtgcttgtggtatgaaactaccaatcttctactttgatattcatgattcaaaaacttcttgttcctttggagaaaatgagcctaagttagtagtcatcctggaaatatgttttcatttctattcatgaaagaatgccagaaactttttatctttgaatccaccagtttatctttgaatccttattttccaaaactaaggtagaaaaatcctcactgtttgatgatttgcagactctggtaaagtgaataaaggtgttagaatcaagacattttactcaaagaccactaatttaaaatggtaagtcagagtctggcccaagtccttgaactctcaagttagattgaattgtaaactgcattaagtcccattattttccctattttgcctgtttatcaatgataacttctagtcagactgggataatcatgaatctacagtgctgaaggcattcatgacaaagctcaccctttgaatcagaaaagcaattcatctgtgtcaaaaaaggatgcaaactaagttttgatcctgtctgataatgccattttccagttataccttatccagcattctttatcaaagccagaaagactgtaagcaagaagaatttagaacagactaggtactgtaattctttgtgtttgaagggtgatattttagacgtagagacaaaaagtctcccttgagtttttgaaagaaattgcttataagggcaaatgttttaggttgaaaagttggtatttttagtttccctgtttatgaatagttcacagggtaatgttgtcagtcattttaaactcatatctccctcttggaacggttatagattgccaagagaaggtagaacttcctgtctctgcgtgtttttctctgaaatagtgtgtgatagagtcacattactccaggctcaattatagacactttgtggttttttttttaataatgccaaaaatctgtggataatgtgtaataagctgatgtacatcctactagaactaaggtatttcagtttgtgatgaatgcatgtcttaacatgttacctcgttaatagtcattggttcataaatgctggggttttttaatttaactctttttatacctaatattagaaattaacacaatttaacattatttcatctaccacattactggccttgttttgattctaaatcttgtgtcctaagttactaattaccatattaattcaaatgtataacctctttatgatttgaggcccactctggaaaagaaaaatactagacatttctattaaattcatgagtgatttttatgtatcttgtggatccatcccccagagtcatttcttacatctttatgttctaacaatgaagtttttgtaacctacttttagcaaaatatacatatatacatatacataacaaaatatacctacagtagcatttggaggtcttttattcccatgattatataacattaagcgatatgtagcccccaaataaatttttctctaggaacttcttcacattgcctacacatgacagttgatacttggttcgttcaatacttaccttggttttcctcctgtgtctttagccattccctaaaagtctcccttttctctcccttacaaatgatggtccccatgagtccacttttagctcccttctcttttccttctatactttcttcctctatatttttttccaaagtaatgtcatctgttcagtggcatcaaccgctgttgatacatgctcatgacgtccaggtacaaataaatacacaagtggtttactctagcccatagctctcttcccagcgttgggcccctatcacctgccaactgcacgtgactgctcgaacattccataaacaatctcaacacatctacaatcatctcatcattttttttcacaaatatgctcctcagtattttcatcatcaatgaatgtagtttactcagttgtccaagccagaaactaattaaattgttctttacaactttttatccctccttgcttctcatagcttttgagagatatctccacatcattttgtttctctcttcacaggaattattctattttatcactttgtttttgcaacagcatcttagctaatttctaagtaattttaccctttgccagaccttttcttctgctgcttccatgttaatacttgtttttggtttttttttctcctttggagatggtgtcttattctgtcacctaggctggagtgcattggcataatcactggtcaccgtaacctcaacgtcccagactcaagcgatcctcctgcctcagcctcccaagtagctgggaccttccaagtaactgcatgccatgatgcccagcttaattttgttgttgttgttagaaacgaagcctcacttcattgcccaggctggtcttaaacgtctgagctcaagcagttctcctaccgtggcctgccaaagtgctgggattacagacatgagccactgcacctggccttcatacttttgaaaacatgtatatggtcgtgttatttccccttaaaattttccaaaggctacttatcctttcaggataaaattcagactcttaagcctggcattgaaggttccccataatccggctcctcctgttgtgcaccaggcccatgttacctcacttttctcctttctctctctcactttttccttctcttgcccttttccctttctccccccgcctccccttttctccctcaattaagatgctacttcttccatgacaaatgatgctgcagcaggaagtcatttctttctctgagtttgctttgaacctctcctattgctgctgctttttttcttatcatgggttaacatatctgtgtacgtgttttctgttgaatgaggagcatctagttcagtgttagacatggttctacctgttagcagtatcacctggaataacacagcctgtgttcttgaggagggagggtccttgtctttttcattcttggaactttttagagctgatttgacaaataaatgtctatttaaaagttactttaaaaaaaagccttagaggccaggcacggtggctcacgcctgtaatcctagcactttgggaggccgagacgggtggatcacgaggtcaggagatcgagaccatcctggctaacnnnnnnnnnnnnnnnnnnnnnnnnnnnnnnnnnnnnnnnnnnnnnnnnnnnnnnnnnnnnnnnnnnnnnnnnnnnnnnnnnnnnnnnnnnnnnnnnnnnnaaaaaaaagccttagaggccaggcacggtggctcacgcctgtaatcctagcactttgggagacggaggcaggcagcaatgacttgaggtcaggagtttgagaccaacctggccaacatggcgaaaccccatctctactaaaaatacaaaattatctgggtgtggtggtgcgtgcctgtaatcccagctacttgggaggctgaggcaggagaatcacttgaaccccagaggcggaggttggagtgagccaatatcgcgccactgtactccagcttgagcaacagagcaagactgtctcaaagaaaagaaaagtcttagaaaaggtatatttttttctaaatttttcaatatagattcatctaataatctcaaaatagttttataatagcctaaataaaatcaacttcacacatgtggccttctattcctatttgagatgcaaagtgatgcaataaatagaacaataataatatattgttttacgttttccatgtatgtattatgaaagcctcacaagcagcctgtgagaaagctgctttcattatgcttgttttatagttgaggaaactgagactataataaagtgagtaattttcccaattatactaataaatggaaaggaacagatccgtaactttggtttccttttgctatctaatgttgctcttctagatcttacctagctggggaaggggaaaatgtgaataaaataccaaaataagtgaatgttaaagtaattcaggcaagaaattatgaattagggttatgtcagaggtggaggatgaagaaatattgaggaggtagaatgaacagaagatttaatgatgtagggatatgtggaatttgaaggaaagggaggagttaaagatgatttaagctaaaagctcccaggacttttgaccccacttttctagcgtgcttggtttctcctttaaaaagattctggagaacagtttaacagttcccaatggaagtaaattataaaagctgagatggggatatttaaaccctagagccagcagcagtggattcaaccctgcagtatcctttgttttatgactaagaaccaatatcatctgttatttaaccaggaagagcaagttcacttttcacaggaccaacattttatattcttctgtgaaatgcataaacaacataatacatgataatggtgaaaagtcagatagtacagaaaggcctataaggaaaagcaacaacacctctaccttttctgtgcccctttccacatcctagagcgaatgatcctttgaactctcttcactcaaaactttgcacttgctcttagctaaggctgagaagcaatcatcattcaaaacttcagactcgtaatgttattttttattgactccttgctacagtcaatatttagcttacttaaattgctgcctgcttttcctcactccttctcccagtttttgtattattattttattactcctgttcgtttcctttgtaactttaaatcatacacttaaaactctaatttctctttgtcatcttgccacaagctgtctcctagtgacatgtaaaataaggtcatcaatacttctacccttccttccacttttcttcccctcccttctctcttccccttttatttttattcatttacacaggacatgcagcaatatcttaaacttgaagactcatcttgtccttctattttggaaaattatgaacaattctcccaaatatttttttctctaatgttttgttctgcaactcctagtagacttagagtctctttgtcttttttacatgtctgttaatttatcttctctcttttttatctctttatgtctctgttccatgttctgagtaaattcctagtactgtctttcaattcactgattctgtcttcagctacgttcaatgtactgtccactgcttattcagtttttgtctgtaattttactaacatatttgctaaattttttattgaagtgtatactatacctctgaaaggatgtgtgtactatcactttagttcactgtatttttacaatctgaaaaatttgtgtaacctgacacccaaatcaagaaacagaatattcccaatactccggaagccctctttatgcttccctccagtaagtaacacctcccttgagtaatcactattctgacttctgaatgcatattttaattttacctgtttttgtgttatatataaatggagttatcaagtcagtactcttttgtgtctgggttctttcactctgcattgtgagttttattcatgtttttacatgtagccaatagttctttcagtctcatcccatatggtattacattggatgactatacaatatttatttgtctagcaattatccatctacttatttattcactgttgatgaagacagagatcatttagtttggggctcttacagctagtggtaccgtaaacatttccagtctagtagtggttcttgacccagggagatagtgaggctgtcacggagatccagtcacagagctggtagatatcttggttctgtttctgttcttgaatctatctgcttgattcgttataccctgatcctaacaagtaattagtaattgggacaggaggcgagtacacaattatagttcctggtgttaactgatgagcctgtatcttcaataaagtgttattagtctccatcatccagtaggagtgagatttctggctcccccaggctgctttcggatccatattcctggcaggccatggggtattttgcagctctgttccatttatgtgccacacatatgtttaagttgtatttgagcccagctatagctttctagatctctccttatagtcatcactatgtattttatatctcagagcatgactttactaaaccctcttaaccagaagcatttctttgaatctgaagactcctggatttagggatatatttatgacttctttttttcttcctttgttttagctcagaaaacttcttgtgttacttctttggtcatttcctttccttcattttcactattctcatcttctaaaacttttagttgttggatttagatttctcttaaaatttttactctgtatttttttatctccttttcttcctttagttcttggttggggggatgaaatatccttgactttatcttacagtacttttgaatttttttattttgctaaagagcattttaactttcttataattggaatgttctttttcatagcctgctgtgtctgttttgtagctttagcgtcttcttggatttctcttaagaaattgattagaccttttaaaaatgttcttctatttcctgaattatttgtgtttcctacagccttcgttgttagattcatgtatcttctctttgatttcagaggtttttcacgtattagttaattcttcattgttccttcatgtttaaggagtactggattgatcgtggtacgtggccaaattgaaattccttgggtggtgtttgtaggttttacttccctgctaggcctctgctctgggcgatacagctgactggcagctttgtagagctggcagaacctgcccatcggtagacgtctctttaggatggatggtgtggacgcactgttaggttggaggcaccccccaaatttgagaatgaaaaagatttactctggggcaccaactgtgatataagcagccctagatcatttcagtagtttatttagtatcaaagagaagattctttcaggtttgtttgcttacttgttacaggtggggaaaataataaactacatgtcctatataagagtgtagggaagtgaggaggggcaactattacagctgttcaaaatagccttgttttaaatcttttattttaagtacaggggtacatgtgcaggtttgttacataggtaaacttatgtcatggaggtttgttgtacagattatttcctcgcccaggtattaagcttagtactctttagttattttataatttgccctgatcctcttcctcctcccgccctccatcctccattaggccccactggctgttgttccctctatgtgtccatgtattctcatcatttagctaccacttataagtgagaacatgtggtatttggttttctgttcctgtgttgttttttaaggataatggtctccagctgcatccatgtgcctgcaaaaggacatgtgctaattctttttttatggctgtatagtattctgtggtgtatatgtactgcgttttccgggggttttttttccttttttttttttttttttttttgagatggagtctcgctctgtcatcaggcctgagtgcaatggcgtgatctcggctcactgcaatctcctcttcccaggttcaagtgattctcctgcttcagcatcctgagtagctcagattacaggcacgtgccagcacgcctggctactttttgtatttttagtacagacaggatggtctcgatctcctgacctcatgatccgcccacctcagcctccccaagtgctgggattgcaggcgtgagccaccgcacctggccccacgttttctttagtctatcattgatgagcatttaggttgattctgtgtctttgctattgttaatagtactgcagtgaacatacacgtgcatgtgtctttataatggaacaatttatattccttagtatgcagacagtaatgggattgctgggtcagatggtgtgtctgtctttagttctttgaggaatcgtcatactatctgccacaatggttgaactaatttacacttccaccaacaatgtataagtgttcagtttcctttttccacaaccttgccagcatctgttattttttgactttttaataatagccattctgactagtgtgagataatattgtggtttcaatttacatttctctgatgatccctgatgttgagcttttttcatgtgcttcttggccacatgtatgtcttcttttgaaaagcgtctgtttatgtattttgcccactttttaatgggatttttttcttgtttaagctccttatagatcctggatattagacctttgtcacatgcataccttgcaaaaattttctcccattctgtaggccgtatactattgaaagtttattttgctgtacagaaactctctagtttacgtagatcctgttcatcaatttttgcttttgttgcagttgctttggcatcctcgttgtaaaatctttgcccattcctgtgtcctgaatggtatggactaggtggtcttccaggttttttatagttttgggttttacatttaagtctttaatccatcttgaattaatttttgtatagggtgtaaggaaggggtccagtttcaatcttctgcatatgactagccagttaccacagcatcatttactgaatagggagttctttccttcattgcttgcttttgtcaggtttgttgaagatcagatagttctagatgggcagccttattttggggctctctcttctgttccattggtctttgtgtctttgtaccagttaccatgctgttttggttactgtagccctgtagtatagtttgaagtcaggtagcgtgatgcctctagctttgttctttttgggtaggattgccttggctattgggaatctttttttggttttcatatgaattttaaaatagttttctagttttgtgaagaatgtcattggtagtttgataggaatagcatcaaatctataaattgctttgttcagtgtggctattaaatgatattgattcttcctatccatgagcatggaatgtttttccatttgtttgtgtcatttctcatttctttgagcagtgttttgtagttctccttggttagctatatttatagtttatactttttcaggcacgtgtaaatggaattacattcctgatttgtctcttggcttgactgttggtgtataggaatgctagtgatatctgtatattgattttatatcctgagagtttgctgaagttttttatcacctgaagaagattttggaccaagatgatggggttttctagatatagaattgtgtcatctgcaaatagggatagtttgatttcctctcttcccttttggatgcctttatttctttctcttgcctgattgccctgtccagggccttcagtactacattgaataggagtggtgagagagggcatccttgtctcatgccagttttcaagggaaatgcttccagcttttgtttattcagtatgatattggctgtggatttgtcatagatggttcttattattttgaggtatgttccttcaatatgtagtttattgagagtttttaacatgaagggatgttgacttttattgaaagccatttctgcatctgttgtgataatcgtgtagtttttgtcttagttctgtttatgtgatgaatcaaattgatttttgcatgtcgaaccgaccttgcatcatagaaacaaagcctacttgatcttgatggataagctttttgatgtgcttctggattcagtttgtcaggattttgttgaggattttgcattgacgttcatcaaggatattggtctgaagttttctttttttgttgtgtctctgccaggttttgatatcaggatgatgccaatctcataggatgagttggggaggagtccctcctcctcagtttttttgaaatagttttagtgttaatggtaccagctcttctttgtacatctggtagaatttagctttgaatttatctcgtactgggcttatttatttatttatttatttatttatttggttggttggtaggctatttgttacttcctcaatttcagggttcattattggtctgttcagggattcagtttcttcctggttcagtcttgggagggtgtatgtgtccaggaatttattcctttcttctagatttcctagtttacatgcataaagttgttcatatattctctggtggtggtttgtatttctgtgggttcagtgataatatcctttttgttatttctaatcgtgtttatttggattttctctcttactagcctacttagcagtttattttattaattatttttcaaaaactaaactcctggactcattgatcctttgaatggcttttcgcgtctcagtctccctcagttcagttgtaatttttgttatttcttgtctactggctttgaggttggtttgctctcagttctctagttcttttagttgtgatataaagttgttatattgagatctttctaactctgtggacatttaatgatacaaacgtccctgttaacattgtcgtagctgtgtcccagagattctggtatgttgtatctttgttctcattagtttcaaagaacttcttgatttctgccttaatttcactatttatgcaaaagtcattcaggagcaggttattcaatttccatataattgtatggtttcgagcaaaattcttagccttgatttctaatttgatcgtgctgtggtctgagagagtgtttgtgatttaagtgcttttgcatttactgaggagtattttctgtgcaattatgtggtcagttttagagtgtgtgccatgcgaaggtgagaatgtacattctgctgctttcgggtggagagttctgtagattcctgtcaagtccctttgatcctatgctgagttcaggtcctaaatctttgtgtgtttttttgtttgtttgtttgtttgtttgagacagtctcactccattgcccaggctggagtgcagtggtgcaatctcggctcactgcaacctccgcctcccgggttcaagcagttctcctgcctcagcctcttcggtaactgggactacaggcgtgcactagcatgcccgctatttttttttttttttttttttttgtatttttagtggagacagtttcgccatgttggccgggctggtctcaaactcctaacctcaagtgatctgtctaccttagccttccaaagtgctgggattacaggcatgagccaccgctcctggccttaatctttgatctaatactgtcagtggggcgttgaagtctcccactattattgtgtgggagtctaagtctctgaaggactctaagaacttgctttctgaatccgggtgctcctgtgttaggtgcgtatatacttaggagttagctcgtcttgttgcattgaaccccttactatttagtaatgctctttttcttctttttaatctttgttggtttaaagtctattttgtctgaaattaggatgtaatcctgcttttttctgtttgcttcgtagatttttctccatttattttgagtctatgcgtgtcgttgcgtatgaaatgggtctcttgaagatagcagcctggggggtcttggttctttatctagcttcccacttggtgccttttaataggggtatttaccccgtttacattcaaggtttgtatggatatgtgtggatctggacctgtcctcatgatgtcagctggttattttgcagacttgtttgtgtggttgctttatcatgtcactggtgtgtttacttaaatgcgtttttcaagtggctggtaatggtctttcctgtccatatttagtgcttccttaaggagctcttgtaaggcgggtttgatagtaatgaatttcctcagcatttgctggtgtgaaaaggaccttgtttttccctcacgtgtcagtttggccagataggaaattctggcttggaatttctgtaagaatgttgatttggtgcccagtctcttctggcttttagggtttctgcggagagggccactgtcagtccgatggacttccctttgtaggtgacctgaccttaccctctagctgcctttaccatgtttttcttcatcttaacctgcaggaatcttacggttatgtcttgaggatgttcttctcgtgaaggatctcactggggttcaatgcatttcttgaatttgaatattagtctctctagctagggatgggaagctctcatggatgatatcctgaaatatgttttccattgctatgctctccccatctctttcagggataccagcgattcatagatttggtctcttttatgtaataccacatttcttggaggttttgtttattcctttatattctcttttctctattattgtctgacttccttatttcagaacaccagtcttcaagctcttagattctgtcctcactgtggtctgttctgtgttaatacttgggattgcatcatgaaatccttacagtgtgtttttcagctctgtccggttgattacgtgtttttctttgctggctgtttagtctgtctgctcctatattgctttattgtgattcttagcttccttgattttgtttcagcatactcctgcatctcaacgatctgcactcctatccatattctgcattccgtttctgtcatttctgccatctcaacccggttcagaacccttgctggagtggtggtgtagtcattttgaggaaagaaggcactctggctttttgagttttcagagttcttggattggttcttccttatctttctgggctaatgtttgttcagtctttgaacttgctgacctttggacagtttttttttttttcttcttcttcttttatactatttgatgaccttcagtgtttgattgtggtataaggtggatgcagccaattgactttgtttctggaagattttagggggccagcactcagctctgatcttctagactgtgtgctctaactttgggggactgatattgggcaatgactttgttctgtggctcctccaggttaggagtccactgtactggtggggccaaggtgctccacgatggctggtcactacgctctgatgggtggtgtctgccaaagtgcttcatagtgtggtggcagcaggatccatcctcatttgcacgtgccagcaatagcagcagtgcagcagagtggacagctgtgacagggtgctagcaggtaccagggtgcctgcccccatgcaggtgttcaccacagtggcagaggcagctcagcttggggggctagggagcccttgctggtgactgtgcatgtggtgttgctggtggttgtgttaacatgggtgtgggttactggtgggggcaggtctctgtgtgccccaggcagcagtggttgctcagggttggggagggtctgctgtcctccgtgcctactttcactcccgtggcatgttggcgcaagggtaggggtggctggctctgtgcccaccaaggctccaactgcagtgacggtccaacagagggggaacagggggcagggtgcacaacattggcagagcagggtgtacacacacgtgcacactggcagggcaaggaaagcaaaatctgcccacgtacacacgtgctggcaaagagatgtggaagcttgccgtaggcctgggggaagctgcagtgtgcggagaaagcaggcaggcctggtgcgtggccagtgtgtgaccgcgggggccagcctgctggagttttttgccagtcaggcttagttcaccagcacaggagctataatgacagcctccagggtacccacggctgtcctgcaagcaggcacagccaggctgtggtccctagagagtcctgcagaccaaagggtgctcaggttggactagccccatctgatgggcaagacctccagagttcaggtcctgcagaggttaggtccagctgttcccctagcgctgaagtcttctatggaagcaagtcaagcctagggagatgggcttccctagccatcctgcactgcagacactaccacaccaaccccctggattccacctcagctaatgtgctgcctttacttctctaagcagctctccctgccaaatcggtgtctgtggtagttgaggggtcgtcttctgctggaattccagaggcccgtagcaagcgcagattattctttgtgagtacgactcactcgttcccttggggtcgttgcgggcaggaatgagtccctgtgcgcagtagcccggtgcggggttcccagcatcctcccctttcagcctgacttctgtgtgttccctccagccaccctcgctgccttccctcggaaggtctgttaggagtgtgccagtcatctcggtttctcactggcagctgttccacctggctacatttagtaggctttattgaccttcccctcttttttaatatagagacagagtctctccatattgcccaggcttgtctcgaattccagggcacaagcagtcctcctaccttggcctcccaaagtgctggaattacaggcctgagccaccgtgtccagcctagtagtctctttaaggatgtgttttccagttcttgttagtttcatcctaaggggtacattgccagtatattctgccttcttccagaggagtaaatatagatcggtttaaaacgcagaatattaacatttctatttttccttgaatgtccatttattctttttttttttttttttttttgaggcagagtctcactctgtcgcccaggctggagtgcagtggcacgatctcagctcacagcagcctctgactcctgggttcaagcaattctcctgcctcagcctcttgagtttttgggacaacaggtgccgccaccatgcccagctaatttgttttgtatttttagtagagatggggtttcaccatgttgaccaaggtggtcttaatctcctgaggattataaatcatgctactataaagacacatgcacacgtatgtttattgcggcactgttcacaatagcaaagacttggaaccaacccaaatgtccatcaacaatagactggattaagaaaatgtggcacatatacaccatgaagtactatgcagccataaaaaaggatgagtttatgtcctttgcaggaacatggatgaagctggaaccatcattctcagcaaactatcacaaggacggaaaaccaaacaccacttgttctcactcataggtgggaattgaagaatgagatcacttggacatagtgaggggaacatcacacactggggcctttttgggggggggtgggtaagggagggatagcgttaggagaaatacctaatatacatgacgagttgatgggtgcagcaaaccaacatggcacgtgtatacctgtgtatgaaaactgcacattgtgtacacgtaccctagaaattaaagtataatttttttaaaaaaaggaatttgaagctttgagatcagcctagaatactttgggtaaattctgttgacagtttcttgctgaatcactttgaatggatattcaaaacttcgtttgaacttaagaaaaataagaatttctttttatatttcactgaatggtaaacagtttctactctgttctgggaattcatagatgaaaggccatggtttttacctttgcagatctatggagagagacacaacacaggagattatattaataatatactataataatagacataaaggaagtatgaacaggtttcagtgggagcttgtagagagcgtttttcctgaaaaagtcaagcaaagataaaactcagtaagcaagaagataaagcaggccaggcgcggtggctcacgcctgtcatcccagcactttgggaggccaaggccgaggccggtggatcacctgaggtcaggagtttgggaccagcctgaccaacatggtgaaaccccgtctatactgaaaaagtacaaaaattagctggtcgtggtggtgcacgcctttaatctcagctactcgggaggctgaggcaggagaatcgtttgaacctaggaggccgaggttgcagtgagctgagattgtgccattgcactccagcctgggcgacaagagtgaaactctgtctcaaaaacaaaaacaaaaaaataaagcaaataattcagggatagagaaaccatggcaaaaggtgataagtgctgaatttaaatctagaacctagactcaatctgagagtacattatcccaggtctccctgatatcgtacagaccctcctagtcttttagctcctaaaggataaatcagagaagagagccttgtgagtattcttaattgataaaatggcagatgaaaagtcacagaggtatgaaatattaatattaacatgtatttgaggaactataagaaatttagtattgctggagtgaaaaatgtttgaggaaaattttgagggaaaaggctagaagggctttgtgtgccactcatttaaattcttattctatagcaaggaagtgagtgatccagtccatatttcaggaagatagtgctgaccctggagtccgttacatgaatgcagacagtaacactctcaaaactgattaaacacacttaatgaaataattaccagtatctatgttatctgccttttttgcctgtcactcatgcggtcctcacaactccctccagcccctaaactaatcagtccgggcattagacagctttgaaatgtttattaagaaaacagtcctattttgacagacaggggttagagcacccggacttaaagcaggctttccagctcttccggggatctctcgtgtaggcgacatgaggccagcagagcccggtgcaaacaggcatcatgagcaaaggaccatttttattttccattgtagacttcgtccttcaaaagagagtgccattcgtcccaactagtatttcccccccttttatctgtatcaccaatgctaaattagttcatgggtcattcaaattatagcagctttggtattagtctttctgtttcagtttcagtgctctgctgattattttggcttgaaaatatcccatgcagtcatcatgctgcttttaattcaaaaggttcctatgagctgcaccaggaatatcgtatctagtataaaaactgtatgtctgttcttccctggagcagattctcttataacttaagaatttagttatcttagtattgatattgagttatttttagagagttctgtggcggttagtgagtggctcagtgttttcatcactcattcacttaactaccctttctgaacatctgtgccacttacgcggtctcacttctcacccgagtcttagatgctttttcattctttatattaccaggaaagattaaacgcatcatataatgccagtgactgcagggctttcctttcaagcttctaaactacatgccagtatgctgaaataaagtatatcccgaggcttatcatttaaagtgtagatttcatatgtaaaaacttttttttttctttttttgagacggagtctcgctctgtcgcccaggctggagtgcagtggcttgatctcggctcactgcaaactccacctcccaggttcacgccattctcctgcctcagcctccctagtagctgggactataggcgcccgccacctcgcccggctaattctttgtattttagtagagacggggtttcactgtgttagccaggatggtctcgatctcctgacctcgtgatcttcccgcctcagcctcccaaagtgctgggattacaggcgtgagccaccgcgcccagcctgtaaaaacattttcatctttgtttataaataaaacatctgattatactaaaatacttttacgggactcataaaagaggggagtcagggttggggcggggtctgtcatttatttacttacttattttttaaagatgtctggcctggttctgtggtggcgacttttcttcgctaatcgtgaactttgcttggagtatgcagtagattcagtcagcatctcagtggggaaagaggggtttcaatacagctgtaatacagtgttctctttgcgttgagtgaagaagctgttgatctctcgaggaggaaaggagagactggaaccacatgaaggtttgtgctgtgaaaccctgatgggacattttgatcgtgtgttttaacaaagctgacagccctcggccacacaattcttgggaagtaaaacaagtattcatttaactcttgactaaagattaaaagatacaattaaaaagaaatctaaaacccagagtggtaattccactttttctttctctttctgttgttggaacctgagctctctaggaaaactaacagttgttaagggcctgccaggtgccagatccatgtctgtaagagaggtataattattgttttatactgtctcaatcttaacaacaactgaactagtaagtttacacatttatatttccatttgatagatacaaacaatgaagttcaggaggctgcctgtctagggtcgtacaactagtaagcagcatgatccaactccaaagcacatgccttttcttctgtattttagtgctccttcagtcacttacatgatttacttgttattcttttataaatttaagcagtagtaaaaagtagaaagaataaagaaaaaaacagccccaaagtcaattgcctagaaaataatcgttatgtgtggtaggtaagcaggcttcctgtcatattcctacgcacatatagaaaaaaattaacatatcataataatgtgccattttaaataaaaattgaatttaattttacttgacattagcagaataaacaaagagaatttcagtagagtgtttctttattataaaggagaattcctcagccatccttgcaagtttaagaaaagagataagagattggggttatgttttataacaacatcttttatttttattttaatcagtattaattcatgccatgctctaaaagatgaagaaattagcaattcttctcatcaatttttagcgacatatttttatatcagctttaccaaggtatataacatttacatcttattttataactcccaggctacttagtctaggtgctacatttaaattcagcacttaacaccttttgccacattttccctacccctgaattctttgctttatcgttttacttatttgattttatcttcacttaactatttcaggaaagactgatgctgaattctgcttttcttgttttctgtttgcgtgcttgatagtgtttatttgccattctgcttgaagtattacttagctggttatgaaattcttaggtatgttcttctaatgcagtggatgaatgttccctgatgctctcttcctaccatcagtgtatctgatgtcaccctctgagtcagaacagaagggctaggaattgacttcagtctgcttttctgtagcctgggaaatgtgaggagctaggaccatgcttagctagggatctgcacactccttgtgggagccctggactcaggttgggtttttttttttgttttttttttcctgaaattttgataaatgtcatgtattcatcctggtaagcgtgagtaggttcagatcatctgtgaaattctttagagactacaagaaaacagcatatcgtggtaatttttcttgcctttatgaggttgccatagttaaatgttttgtcctgactcatctcttaaaccaccaattcaccctttcaatctgtttttctccaaatttggggatattactgggaattctcacagttttatcacctcacttctcagttgtttctgggcttagaatagggtaaagagcgacactatttttcaccacaattttcgtttgattttcttacctgcagcctgactcaaaaacactgacaagccttctttcatttctagaacaactgattgaccctaatagaatacataggttctgtcagtcagttattatagtgtataggaaacagagcatgttgtgacatttgtttatttaagagatgatggctttcaggttttttgggttttgtttgttttgatcctttgaggatcgtatgttgtagtccagagaaggtatttagaattgtgacaaggtaataaaattgagacaaacacaattatttatctttgtcgagactcactcctggcaattttcaaatgtaccttcgttgaaatgcatcattgaaatactagcatacattttaggtacctttttactttttcacagtgtgcttattagtcagtgtaaaatgcacccaaatcaaaattaactgctttgaaaagggaagttgatggcttctcggccatttggctaagatcaactgaaaagggaagtagagataatacggtgtaacaatttatttttaaaacaattagttttcctaaattgacaaataaaaattgtgtatgtccatcatgtacaacatgatgtttggaaatacgcacattttgtggaattgttaaatcaagctaattaacatattcattacctcacatgcttatcatttttcatggtgagaacacttagaatctatactcagcaattttcaagacgtaatttctatatagagaaaatctgtagaactcaggcttatctattttgaaggttcttcagatatatttccaagaaaatacagtataaattttgtaattcataccagttttcacgctagccacataaatttttcctttttgctcccaggttaagaattcaaggcttacaaaaatgaacacagggccgggcatggtggctcacgcctgtaatcccagcacttgggaggctgagacgggaagatcacctgaggtcaggagttcaagaccagcctggccaacatggtgaaaccccgtctctactaaaaatacaaaaattagctgggcaaggtggcgcatgcctgtagtcccagctactcaggaggctgaggcatgagaattgcttgaacccaggaggcagtgagctgagatggcaccactgcactccaacctggtcaacagagtaagattcggtctcaagaaaaaaaaaattaaaattaaaaatgaacacaggcttctcgtatgtctgtccacttagttgattctctagagtgtgacacgttttacaatgtgttgtctacagtatttatttacattgtctggcatgctataaaggttggtagcatttgctaataaggaaccactctagtgaccgatgtgaatgatctaccactgcctcctcctggtttggatttctttcctagcaaaatacggatataagaagtgagccagacatctttgagaaggagcatgtctgccactcttgtttccaaaagtgtttatatttattcattaaaggacttttgttactgaattctttttaggaaacttagtgacccatacattgcctgtatggctaatgatgaagaatcagcttaaggggaaaaaatgtataacgtccagccaggcacagtggctcacgcccataatcccagccctttgggaggccgtggcgggcagatcacttgaggtcaggagttcgagaccagcctggccaacatggtgaaaccccgtctctaccaaaaatacaaaaattagccaggcgtggtggcaggcacctgtagtctcagttactcaggaggctgaggcaggagaattgcttgaacctgggaggcagaggttgcagtgagccgagattataccactgcactccagcccaggcaacagagcgaagactccatctcaaaaaaaaaaaaaaaaaaaagtataatgtctcacaatataaggcaacaagatttcctacttagggccgggcgtggtggctcacacctgtaatcccagcactttgggaggccgaggcgggtgggtcacgaggtcaggagatcgagaccatcctggctaacacagtgaaaccctgtctctactaaaaatacaaaaaactagccgggcgaggtggcgggcgcctgtagtcccagctactcgggaggctgaggcaggagaatggcgtgaacccgggaggcggagcttgcagtaagccgagatcgcgcctctgcactccagcctgggcgacagagcaagactccgcctcaaaaaaaaaaaaatttcctactcaggacttaccaaagacctgtgtctcttaaaatacatggggcgccagaatgtaggttttttggtaactgcccggcattcccatactcatttccttcctcagttttatgattcactgggaagcttcaagccttgaaatctttctgatttcatttttgcagtatgctttttcttcccatggccgtgctcggattgctgcacacctcatgtgattatgcagtccagtcatttcgatgacttggggagatgtgaagaggctgagctagacttcagattttctcctgtcctgtgttcttcttgtaaaggaatgcagtcaggcactgtcttttttgtgtctgttgttggctgcatgtcctcaaaacatattcaacaagtagatgtctattgaaaaaaggaaattttcctcagttacacccaagaaaacgacgacattggagtcagttccatgtttataatagagtcccaacacttctttttctccagggtttctacaagaagaagcataaaacagtgttagtatgtaactggcctttggctttgaggcttcagtaaatccgtaaagtgagatcaattaggattaatagccttttttctagctaaaaagtgttcaagatcttggcttaaaaagagttctttttggctgggcccagtggctctcgcctgtaatcccagcactttgggaggccgaggtgggcggatcacgacgtcagaagttcaagaccagcctgtccaatatggtgaaaccccgtctctactaaaaaaatacaaaaattagccgggcatagtgccacgcacctgtagtcccagctactcgggaggctgaggcagaagagccgcttgaacccaggagacagaggttgcagtgagctgagatcgccccactgcactccagcctgggcaacagagtgagactgtctcaaaaaaaaaaaaaaaaagctttttgatacctgttttagctgcttccagtattttattcaaagagttgagaacataaaagatagcttgattatacttagaccttaagaaacttgtaggagttcatcaaacacataacgtttacagctggttagacttccagctttcctagacaagagtatggcgctcttgccagtgttggtttaaagtatgtgtaatttacataaaagagcactgactgcagcgtaggtctccaggcggagaatgcgctgacaactttgtctccaggtccactctgctgctgctgactgaggagggagaccaggttcacagtgttgtgctttcttcttttggcaccaaaaggggctcctcctggttgatgagttttaaaggatgagggaaaaattcgtcctggggaatgttattttccttagtgggtaagtcaagtcagggaaaaacagaaaacaatggagataagaggatgggatgcattaaatttatcctatagctctttcaccacagtaattcactcagaagggactcattctgaatgcagtatttagtgttaaaagaacaggcctggggcaagcgcaggccagcactgagaaacagtggtgggttgagacctattgtattttttaagtggtttcaaggctgtccaggtgtcctgatttaaaggctgcttcttaagtcaggaaattgtatcttgttctgaggtttactgtaataaagtacacagtcctaggggatggtacttctagctccatgaatcactttacaggctggcggtactgacccaagcctcatgatttatttatgccataccacagtaggaatggcaaatatgtaagccacacatggtctatgggatgggcctttaactgggaaactgccataaatccacgaagtcagataggacagagccagcaggagcgcatgtcgtgtacacgatttcttcctgttttatagggacttacagttctagaacttattaagttcttcatccttcttggaatgtatatctgtcgtaatctgttttgtgttgttataaaagaatacctgcgcctgggtaattcataatgtaaccaggtttatgtagctcacggttctgcaggctaagaagttcaagggcgtggccctggcttctggcaagggctttcatgctgcctcacaagatagcagagaaggtcaacggggaaggggacacaggcaaacaggaaaacctgagggtccgtcccggctttatcacaacccactctgctgggaactaatccattccctgcaatatctgataccatcttgtcagagtgggaactcagtcactaccacaagaacagcaccaagccattcctgaaggattcgcccccccgtgacctgaacacctcccattaggccccacctgccaacaccatcatactgggaatcaaattgcaacaggagtttcggtggggacagatgaacagtatccacaccatagcaatatccttggactgtttgtgtgctgtgttggtttatccagtctttgatttactgcttacaaatctaaagaatagctctgaaatatagtctagcactgttgtcactgatactttctcttggatttatttctataaagtgtcgcccatgtttttcaaataatttctatgttttgattaaatactaaggcgtgcgatggccagatctaaagagtatgtttagtcgtgtacaaaactgccaaactgtcttccagagtgctgcaccattttgcattcccacccgtggagaatgagaattcctgttgctcggcattcttgccatcatgtggtagtgtgagtgctctggatttcgtccattgtagtaagtgtgtagtggtatctcattgttctcacgtgcatttcctgattccgtatggtgtggagcatctttttggatgctgatgtgccgtctgtatgtagtctttggtgaggtgtctgttaaggtctctggtgcattttcttccttttatcttgttttatttttgttttttataatattttaaatttttagttgatacaacataattgtacatatatatggggtacgttgtgatgttttaatacatgcaatgtatggtaaggcccattttttaatcagatcatttattttcttagtgttgaattttaagtgtctgtatattttggataacagtccttgatcaaatgtatcttttgcaagtattttctcccattctgtggtttatcttctcattctcttaatatttgaatatttaaacacatttataaattaatggtagattatttataacaatggttaaacggttggtaagtaaatcactactgagcatatactgcttcgaagggcccagggatccattaggcctccagctataacccagcacagcattctgaaatacccagttctccccagagtttcaggagtccccaggccttaaccacctcattgcctcaagaactcttagagctcaccaggctccatctaccacaagccttcgtcatatcaccctgttcctgttgcttaggagctttctcaggatagcatttcaagattaagtacccatcctagatttctcagtgctcctcgtgacctttgtcacgtggaaggcatttaataaatgtgtgctgaactgaactgaaccagcaagcacaaaagagattgaaaagactgccatcgtaattgaaaaggattaaaaagacactgggaaaggcagcatgtatttgggggaatatgagaaatttctaaatcactggaccctcagcctggaaaatttaggttggagccaaactgcaaatggtttgaatgtcatcatgtatagtttacgtatttatatatacttacctttcttgtagaagggtgaattatcattttataatagctagaatgttcttagaatttatcttcttagttcagaaaacatcacattgcgatctgccagtagccaccccctgcagtaatttcttgtcctcgttggccttcagtctgagctcttactgccgttttctctggtacacttgcacatgcacgccgtgaccgcagacatctgagagaatggaaataatatgtttaatgagagattgttattggagactgtagcacttgtttttattctttctattgctttttctctttgtttctttcaaagtacatacaaatacatattgattatatcctatgtaagggaatgtgtatttagaataggactactttaagtttgaaatgccttttttcttacagaggagtgtgatttaagcatgtatattcagtcagatcttttagctctcaccttgataaaattatcgggcatgagaagcaatcaagtcttcttttctagaaatacgtttgaacgagaaaaataatgaactttataaattaagagaggttatggtttaatctcttgaaaatttcctaaaatcagtctaatcatgtacaagccatgaaggatccacatttgttgtttgtactctttgtactaatttcgtaaggctgactttgttctataaaatcatcaggacaggagcctccaacatgtatcgactctttgtttaactgaggttttttttgtttttgtttttgtttttgagatggagtctcgctctgtcacccaagctggagtgcagtggcgcgatctccactcgctacaacttccgcctcctggattcaagcgattcttgtgcctcagtctcccaagtaggtggattataggtgtgcgccaccacgctcagctaatttttgtattttcagtggagatggggttatgtcgcattggccaggcttgtctccaactcctgaccacaagtgatccacctgcctcagcctcccaaagtgctgggattacaagcgtgagccaccatgcctggtctcactgaggttttaagaaatgattttgccgggcgcggtggctcacgcctgtaatcccagcactttgggaggctgagatgggtggatcatgaggtcaggagttcaagaccagcctggccaagatgcttaaaccccatctctactaaaaatacaaaaattatcctggcgtggtggtgggcgcctggaatcccagctactcggcaggctgaggcaggagaattgcttgaacccgggtggcagaggttgcagtgagctgagattgtgccattggactccagcctgggcgacagagcaagacaccgtctcaaaaaaaacattattttacacatgacacagcttataattaccttaaataaaatattccagacatacttgcatatcctagaaataacctcagcaaatcagcccatcaactgccagttcgtacaggtcacccggctcgttaagactttgactcagtgtacttgagcttagagaagagctaaattaagtcacaggaacttggtcaaatttttgacaaataattgttttgtttttttttttttttgagacggagtctcactctgtctcccaggcattgcagctcactgcaacctctgcctcccaagttcacaccgttctccttcctcagcctcccgagtagctgggactacaggtgcccgccaccatgcccggctaattttttgtatttttaggagagacggggtttcactgtgttggccaggatggtctcgatctcttgacctcatgatccacctacctcggcctcccaaagtgctgggattccaggcatgagccaccatgcctggcctttaacaggatctttcacagaaaagttcattttgatgaaacccagtttatcagtatttcctgctagggattgtgcttttggttttaagtctcagaactctacctagctctagactttcccctgtgtttttaataaaagttaaaactttttaaaaaagtatagttttgcgttttacttttttttttttttttttgagacagagtctcgcactctcgcccaggctggagtgcagtgttgcaatctcggctcactgcaagctgcacctcccgggttcacgccattctcctgcctcagcctcccgaatagctgggactacgggcgcccggcaccacgcccagctaattgtttttttttgtattttagtagagacggggtttcaccgtgttagccaggatggtctcgatctcctgacctcgtgatccgcccaagtgctgggaatacaggcgtgagccaccacgcccagccctagctgcttttttataacatggccaggctgagaatttcccaaattttttttttttttttgagacggagtctcgctctgtcgcccaggctggagtgcagtggccagatctcagctcactgcaagctccgcctcccgggttcccaccattctcctgcctcattctccttcctcagcctcccgagtagctgggactacaggcgccgccacctcgcccggctaattttttgtatttttaggagagacggggtttcaccgtgttagccaggatggtctcgatctcctgacctcgtgattcgcccgcctcggcctcccaaagtgctgggattacaggcttgagccaccgcgcccggccgagtgattgaatttcttttacagagcttaaaggaacagaactgcggttacaaagagacagctctttcagtcttaataattatgcaagataataaaaaatatgaataaaacttagaaacaaagagacagctttcgggatcagttctgtaagtaatttcctaagaggctgtcaaagctggtataggctccagctcattcagtgtgtttaaacagagtctggagggccgctcggcagccatgtggtgtggaacaaaagcaagccgtgatttgcgtgaatggatttgatctataaggtccttgttattctaagagtttgtgattctggttttgttgggtgtgatcttgaaagactgatttgtgatctctttctacttcttcactgctgttcactgcccagcccattgtaacatgtcttctgactccagccctgaaactactctccagttttttcttttttcttttttttattgagacggagtctcgctctgtggcccaggctggagtgcagtggccggatctcagctcactgcaagctccgcctcccgggttcacgccattctccggcctcagcctcgcgagtagctgggaccacaggcgctgccaccgcgcctggctagttttttgtattttttagtagagatggggtttcaccgtgtttgccaggatggtctcgatctcctgaccttgtgatctgcccgcctcagtctcccaaagtgccgggattacaggcgtgagccaccgtgcctggcccaaagtagtaacttttgaaaaactaaatccaatagaaattttgtattctttatcttgacctgcctgtgaacactttaacatgtttaatctcttcttatttctggaaactttctttatctttggcttccaagggaccaccttctttttgttttctttttcctctaagaccattccccctcagttcttcatagacttcttccaccagtgctgtgtgccccgcctcttatcttggtggtctcatgtactcctgtgatttcagtgtggatcattcccacgtagtctttaatcgggtcctgattgcaggactgtcagtatagctgcctaccagatacctccccaaattcataaggttgttgtaaagattaaattactcagttaaggccaggtgtggtggctcacgcctagaatcccagcactttgggaggccgaggtgggccaatcacttgaggtcaggagttcaagacaagtcttgccaacatggtgaaaccccgtgtctactaaaattggaaaaactaactgggcatggtggcaggcgcctgtaaccccagctactcaggaggctgaagcaggaatcatttgaacccgggaggcagaggtttcaatgagccgagattgtgccattgcattccagcctgggcgacaagagtgaaactccatctcaaaaaaaaaaaaaaaaaaaaaattacttaaaggtgcctagtagaatatctggctctgtagtaatcatgctggcaatgctaattatagtgagcttttacccagttcattcatactcttgaagaatcatttatttatcctttttttggggtcagggggcagtggagccttgctctgtcatccaggctggagtgcagaagcacagtattggctcactgcaacctccgtgtcgtgggttcaattgattctcctgcctcggcctcctgagtagctgagactacaagagtgcgcctggctagtttctgtgttttgtagagatggggtgtcatcaagttggccatgctggtcttgaacaactgacctcaggtggtcacccacctcggcctcccaaaatcctgggattacagcagcccacccactgatttatccttaaatcaccacttcccagactgttttcttgtgtactggtatccctcaaggtgttaagtgatgttctacccagaaaaaagagaaggtggggatcaattaagtttggaaaatactttataggtagggttggaactttttcacgagccagactgtaaacttactgggctttgtgggccatttggtgtctgtcacactactcaaatctcttgtagcaccaaagcagccatagaaaatatgtaagaaaatgagcaaggttttgttccactaaaattttatttgtggccactaaaatttgaatttcctatacttttcacaaaatgtaattattatatgttatatgttatattatttggagttacaaaagtattattattttctttttctcaaccatttaaaaatggaaaagccattctttgctcatgggccatgggccagctttggccatgggtgggcagtagcttgctgattcccgctttaaaatatagccccctattaaagataggcaaccgacaccatagaaagcttctctaagttctgcaacagtgctgttatgaccagtgttcctcaaacatatttgaccatggaaatcttttgtcgtgcttgtttgttactgtctcttgctgtacttccgtggaaggtacttttgagaaatactgacctagagaatagctatgtgtgccagaggtgaaggtcggcctgtggagcagactataaaaaacaagcgaaagcatcttgtcttgattcctcttgctctgatcgtcagcgctgactggtcacagacagaatggtattttgggaaattgaattcactcttatgaggtaggcaccagtgaaccactaaagccgagtcaaagatgggctgaattgagggtggacatgatgaagttaattccatcaaccagcttcagaaatgggaaaaatggctttaacgtaaggtagaatagaagtgctgtaagtgagataaaatattcggtccaggctgggtacggtggcttacgcctgtaatcctagcactttgggaggccaaagtgggtggattgcttgagctcagaagttcaagaccagcctgggcaacatgatgaaaccccgtctctacaaaatatacaaaaaaaaattagccaggcctggtggcacatgcctgtggtcccagctacttgcagggctgaggtgggaggatcacttgagccaaggaggtcaaggctgcagtgagctgagatcacaccactgtactcctggctgggtgacaaagtgagactctgtctaaaaaaaaaaaggtttgtgtgtgtatataatatatatttatatttatattctgttgagaggaagaagagatccagaggtcatatgcaaaatacaaacagtaataggtatcgatttctatagttttgaaatctttactgctattgttttaaaatatgcaaaagtgaaagaaaaactttaaaaaattgaattatatataataaaattctaaaacttgctttgaaataatcttttcagttgctggggttttttgttgttgttgttgttgtttttttgtatctttgagaagtaggatgtgtgactcagtaggcggtaaaggttattgctttactattttgagcatatttttccctaataaaaataatgccatagctagggagagaaccttcaaattaaaaacaagatcacattcattttaaaagtctgcacttcacatctttttatgcctactttaactgtatggcccttattaaaaggaaaaattgatgtagtaagcgttgtttttagattgtgtctggcatatggcaagcagctagaacctataggaggatgcagaaaagacgggatcatcccagctgatggtaacttatctacaagcgtcgtcatttgcccattcccacagaatttacataccaggtgtctctttccaaacctgtgtaggagaaaaggtactcttacagtttttgctaacaaattgatagctgatgaataataaaattgttgaatcattaatgcaagaaggtaataagttaccaggttcgttttcatccattcggccaacaaatgtttttggtgacctccaagatctcagtagccccagtgtcttcagttctctctcagcatcccagtatgcagtcatacatatccctgacaactttcataggcttcctatacagctgtaggagtatatcttggatacttactcattggagcagttcctactttttttttaagtgtaccacaaatcccaaaattagatattctatataacgttggctattttatgagatcaagacacagttggatcttgattttgctagaggtggagaactgagtgccctgacactgctgacattctcctagcaaatgtcatggcaaacaaacttggaatgcagcacaggctaaagaaaggcaagcaagccccctcagtagcacagtgtggacagctggtatggacatgttatccatcgaaaactgggaaaggttaaataaacagtgggacagcgacaaagtgcagagagtaattgctgacagcattcaataattcttaaaacagacgtctaagtaagtagaagcattctggagtttgggttctgagagacaatgtaagaaggctttattttcttttggagacagacttcctaaggaaagaagacaagatagatggtgtaatccaaaagtagacgtatataacaacaggtgtaccttagtttgaagggactgcgtcttcatatgggaaggttgtattctgaaattttctgttcatgttacatacactatcaaacatgaagtataaaggacgtactattgtaaaataataaagacaaaatgagagaaaaggccaatataaatctttttatcagaccatctccagatgttactgtgaacctacttcgcttcatctcttgaggctcaagctcagcttcccctcctccaacttcatccccagatctccagcacagatcagtggatttaagacataattcagtagagattttgacaggatttgagtaaatccctaacagaaactcccttggcttgccagctatttttaaaggcagatatgtagaaagcagaagatcctaaattcacctatctgtcttgtgatagcccttgccaggaaaataggaggagatttgcacaagaatgtattataggatgttcttatggtacatgcctgtagtcccagcttcttgggaggatggcttgagcccagcagtttgaggctatagtgagctgtgatcatgcctgtgagaaaacattgtaccccaacctggacaacagcaaggccttgtctgttcaaacaaactgtttcgttgttttttttttttttttttccaaataatatgttagatagaaccaacccatagaagtcatctctgcctaatatttctaagtccaataatgatcaacattatgagtgcctgcaatatcatcagagtttaagagttgaaagttactttgatcattttcactatggaattgaaagattctttttatatacttatcgaattaggaaagtacatacaaatgctaaaaatccagtcttggcaaggatgtagggaatcagaggtatctaataccttaatgttggtctcttaaattagctcgtcttcctctaaaacagtggatctcaagtacagatgtccattccagaaactcagtaggtctggagtagagcacggactgccattttgaataatttctttcatgttttgagaaccactattgtaaagcaaatctgacgctatgtaatgagctgtacaactctccacagccatcgacctatctgtgagcctttcttgggttctgcaggggaaagctacttcccgctcatagatatttcccagtataggcactctggattgattttcataggctaaatcatttagaatttctatatccattttcactttaaccgttatagtttggcatgacgtaaatcttcttacatcaacaaagatagcgtttgcttcgttttttcattctggtgtggagtaattttctggaagaaaatgtcactgataggtctttgctctgctcccttgaagtcaggaatccaaaattgtcattagtaccgtattggagtcctcaaaactttgaccaaagtggggaaagagaaacgttaacagctttagggaaaagtaggttcagtcgaggctttctccctgagcgtcagtaattgtagcatggtgaggggttgaataagcaatcattttaggtcaaataaaacacattttctttacaagttctgtcaaaataggtagacattaggtagaatccaggaatcacttctacactcaacagaaatagagacaactcactaggacgatgactgtcgggaacagcctaagatggtcttagttcattttgtgctgcaataatagagtaccacagactgagtaatttataatgaacagaaattttgccttatggttctggaagctggaaagtccaaaagcaagaagctgacacctgacaagggtctttttgctgtgtcatcccatagcggaagggcaaagagagagtaagagaaaggcagaaggcaggcgaaaggaggccatactcctccttttacagagaccccgcttccttgttaacagaccgacccccacgataacggcattaatccattcatgaaggcatagcagtcacggcctagcataccctaagggtgctacccattaatactgttacaaaggcagttaaatttcaacatgagtttgggagggaatagtcaaaccttggcccactctcactgaattgatgttgttttcctttctgttataatgtttcaccataaattgtagttccctacatactatattgaaagaactattggtctctgtatatttgtgtatcacaaaagagttacgtcatctttagagtcttctaacatggagaatatatagatacattttatatacaatttgatagttgactaattctatagatgtaggcttttttttaaagaaagatactatgtgccattattttgcaaattaatgtaaatcttaaaacatgttagtggttcttattctaaacagtaaataccaaatgagcagacattgtcctgacaaaggtactcctttctcctctggcatcttctttttttgtttaagaaggcattctgaggcatgttgtaatttcttaatttctcttataatttttttatttcggttatattgtctgttttactgttgacagacattaagtataattcaaaagtaaagaagcttagaatataaaccaggatctggatgtcatactcagcagaagggactctctagtcatgaagaaaatgaagcttggctgtgaagtagaagaatatttccatcaaaaaataagaatgttggaacgaacttaggatccaatagagtctcacaagagtcatataggtgattttacacttacttcattggagctgtcatggctcaaatatatttgtgatccttttcttggaaattgctttcagagccagtttgcaggatgctcctgaaaataaatatgtatttacacctcattgtgatctgtaaaacatatcactctgattcattgtccacaagacttggtgtcaaaattaaaattcagtttaataaataggatatttgtcataattccaaatatttaaataatgcaataaaactttgaagccagcttaaagagaaatttggcagcatcactagaataagtttttgtgtaactttccaaaattaattacccgaagaacatatctttcatttcaaatataagtacaagtatattttataaaggaagcagctagataattttgctaaagtaacatttaaggaaatacagggctgggtacagtggctcacacctgtaattccagcactttgggaggctgaagtgagagggtcacttgagccacagacagcagcctgggccacacggcaaaaccccctctctaatatagatagatagatagatagatagatagatagatagatagatagatagatagatagatagacagacagacagacagacagacagacagatagatagatagatagatagatagatagaatgaattagctgggtatggtggtgccagctacttggtatggagtcccagctacttggaatgctgaggtgggagaatcaccagagtctgggaaatctaggctgcagttgtctgcgatctcaccactgcactccagcctgggcgatgggagtgagactctgtctcaaaaaaagaaaaaaggtgggcatagaagatgaatggaagatactcaaagatagacccactaaattgacaagatgctatttcagtctctggcctaaaaaaataatggcctgtttttattaaactagtaaacaatttgtagaaatgcatgatttgattaaatgagttttggaggccaccttcataagggaagctagaactgtacttaaataccaggagtcctgctgcctccttaatcttgacactaaaactaagacctctatctaaaaccttagcctaaattcccattctcccgtcatgaacatcgaatgaaaatccgtcatgagttggttttcacgaaagtgcctccaggaaagcaaagctccggaacgctgggccacagagtaccacatttgtaagaccatgattattcattaaaaacggagggcgtagtttttggaaggcctttgcttagtatgggatgaaactagcagctcgactgtgtatgcagtatgggggaaagagtgaaaagaatgtccagagttccctgggaccttctttaaagccatggggctgaactttatttaaaatattcacggaaaagcacctggactccaatgctacttaaagtcattctgtgtttccatgcagttccttatttgcttttagaccttttatcttcaagttgttttattttgttgctagtatttcttcaggtgtcatgatcttacagccctatagaagataagacaccctattgggtgcatgtgaattttaaccaaatattggaattcctataaatacgtcatttcttgaacagattttcagtatcactataaatgatgtgtaacattaagtgaccaaaaacaagtcattcacagagattctgcatcatattcagtcggacagcactgaagctgtggttgtatatttttaactagacttaagaaaaaaggacatcaggaccccagcaaagttggcagcattccccaggtcttgtgagttcttctgccctagaccttttctcatctgctttgtccatctgatcctggcacttgccagctctgccttcttagtccagcagtggctagataagaaccagtgatctttagaagtctctctctctctctctctctctctctctctgtctggagaatacagtaaaagaagactcgaggaaaaaatattcatagggtaattggtatcttccacattatttaaatttggaaacataaacgtactttgtgcttgaatcatactaggtgaaataagccagatacaaaaggccaaatgctgggtgatcctacttgtatgaggtacctggagtagtcaggttcaaacacacggaaagtagaatggtggctgcaagggctggagggggcagaggaggggtgttagcgtgtcacaggcagagagcttctttttggaaaatgaaaaatctttggatatgtgtggtggcgacagttgcacaacaatgtcagtgtacttaatgccacagaaatacatgctttaaaatggtttaaaatggtaaattttatgttatctatatttgatcataggttaaaaaaaaaagtgcttatactcatcatgtttgctatatgagaacattcctcattcagaagattttatggtttttaaactaacgtgtctgagaaatagtataaatacagtgaagtgcaaacatttgagacgtacgttttgggagcttgtcaagccgcagtcgtttccaggagcttctctctgtccctttctactcactctccatgtcccactgcagcccctggcaacggctgatctgcctcctactgtagattagaatacaattcatttttatatttttaaacaaatttggagtatataaacttgttttttaacaaggggagatacaaatgtcgagtttttgcccatctgagaagcaggtagaggctttacagcagaagcctcaagagcacagtacaactgagccttctaaacttgccatactcttgtatgaatatgctcatttttcagaaaaggtgaaggaaaaaactgaaggcaagttttccacccacaattttgttcagtcagtgtcatttactaagctatcatcaccagcagtttctgcctttaggatgttaattttgatccttttcaagaatttgtgaaaaatggaagtcagtccatattgggataacttctctacccattcccttgtgagcgtatttctttcctttttttttttttttcttttttctggagacagggtcttgctctgtcacctagactggaatgcagcgtggtacaatcacggttcactgcagcctcgacctgctgggcacaaaggatgctcccacctcagccccccgggtagctgggactgtaggcatgcaccaccaggcccagctagtttttttttatttttttgcagagatgaggttccactatgttgcacaggctggtctcgaattcctgggctcagatgatccacctgcctcagcctcccaaactgttgccattacaggtgtgagccaccgagcccaatcacgagtgtatttctcactgtgtaggtcagttcctttcccttgttttaggagatggagaaacatgagatgagcagcaaatgagaaacttggacatggtgcttcgcacaggacttgccattgtgctgcaggaaggctgtgctaggcgggaccccagcgtgcactgttggaacagtgccctaaagtagcctatatttggtgacctttgaaagtttctttgtagcgtttaagcataaatgtgatagttattttagttattttgtgttgcatattcattgactagcatagcagtctttcacttagagtcctaactgcaattcttgaatccaggagtcagacagcagcattttattcttcgttctttaggaattgtttttgtaatataagatttttacttctaacacatctctagtagtagcatcctggcctttctccttgcagaaccttgtaatctctcctcattaccttcagctcagtctttctaagaccttgctttacttctctaaaacttttggtatttctgtattacgcacaaaatcaaatcatttctcattcagcatttttgtgtaccctctgcctgtcggttctggtcagaaccctcaaggatttcacattctgtgtttattccttaggccaccattccagaccatccctactctgatttagagctacctcttcagcttctctgccatttcctgtccctgtagacactccctaatccagttctacgatgtgtcctcacatgtgactggtgctttcacacttgccactctgtctttcttattgctctgtcaaaatagggcccgtctcagttcccatgtccttagcctgaggtgactcctctctgctgcactacttcagcatttactgcccaggcaatatatttggcacttaccatttattgtttcatctcattagttttattaaaatcttagagttgaaaatgacagtctcaccactgaaaacaaaattacttgcacagtatctctgataatctctttaaacacgtagtcatggaaagatctataattttttggctttccaattctacttattaacaaatattaatacactagccgttccttttataaaccaaattctctctcttttatgacttcccccactttggtgacagttgtgccctctggacaaacacagattcaatgttctgtttttgcaaaacctaccttaaaaattttggtagcagtgattgtgctatgttagtaaatctttttagattagcatacccttatataatcccactatgtcatcttcctttgataccttctacttttgtaccctcttaaattatggcgtatagaattgaacctagtgaactaggtgtcagctgttcagttggagaaaacacaagtctttctttctttaaatgaactgtagattgcccaaagctcatgttttttttctagttgtagtttcttttatgtttatcttccttatgtgctctgctcacttgcctggatgctactggcctggaaaaaaaaaatgccttaaaagtacggtgaaatacagcttcagaataggtgaaaacactgaacagctgggcaaccaccacaacagacagaaatgaagtcagaatcagagcagctattggttcaagatacgtttcttatgagcccactctgtgctgggaactattcttagcatttgggacacgttagagaataaaccagacgaagatcctgtctttgagcagtttgtattccagccgttcctaagcacaggctttgggcaaacggtgaagacgagcagatatgatcagtgtgtcgagtaactgcagccctcaataaaataaaacaagaaagctcaagcagtttcggctaatgcaatgtagaacattaacaatatttgaaagcttttagttttcataaggttgatgtaaggattaaattactcagttaaggccgggcacggtggctcaagcctgtaatcccagcacttcgggaggccgaggcgggcggatcacgaggtcaggagatcgcgaccatcctggcgaacacggtgaaaccccgtctctactaaaaatacaaaaaaattagccgggcgtggtggcaggtgcctgtagtcctggcttcttgggaggctgaggcaggagaatggtgtgaagccgggaggcggagcttgcagtgagctgagatcgcgccactgcactccagccggggcgacagagcaagacttcatctccaaaaaaaaaagtaaaaatagcagcattatgataatacctgaaagatagacacaaccgaagtgtccatgatggatgaatggataaagaaaatgtggtatgtgcatgcaatggaatattgttcagccttgaaaaaggagattctgccacatgctacatggatgaaccttgaaaacatcatgttaagtcaaatgagccagtcacaaaaagacaaatactgtttgatttcacttacgggaggtacctagagaagtcaaattcatagagatagaaagtaagtggtgactgccagaggctgggggaggtggaaaagaggagttattgtttatgggtgtagtttcacctttgtaagatgaaaagagctctggagattggttgcacaacaatctaaatgtactttactgaacggttcatgtataaatggttatggtaaattttatgtgtgttttaccacaactaaaaaaaatctaaaagataaaaaattaatgagctaataaaccgaaagaccaataaaccagaaacgttaaacagttttaagaggtaaatcataaacatactataatcagagaaacagaccctacccatgtagaagaatcaaaaaacatttacagagcaaatgcctgttaatatcatccaaactgtataagtgctgaaagaagatgctgaatggagagaaattagcagttaagtgagaagccagattttgaaggagagaaagctacaggcatttcaggcagaggacgtaacataaacctaagtgaaaacacatagcagctccatgacagagtccttggaagacaatagggaagaaatgggttaaaaaattgtaggtgatcctgaatattaggccacaatatttgctatggcaagagacctaatgacggtgaccttggaaaagtaggacagtatagaatgatggagaaatcagagaagaggctttaagaataatgcaggcccaagataaaagggtgggagtgacctgcacatacaaaacagtgggtacattaaaaactattagacaagaagagccagcaaaacttggatattagccagtgagagcagagaagaaatcaaatgatttaaatgtggtcagcctgtggatccaggaatatgatggctctattaacattagaagggtaatttgttatggtggaaggaaaagttaatttcgtgttgacattttacattaaagagatatttctgggcacctaaatcaagatgacctacagaggacataagaggtacagggaccaaagatggcgagagcagacatttcagtgaggtccacccacagaggctgtcccatggactatggttttcagagtttatttaagtagtgtgtctaccgtagcctctgaaacctctgcaagggaagctgaagaatctagtccttagaggatatcttcaggagaagagatagaagagtagaagagatatattggtagtttactactcactcttgatagttaattggttaaataacaaggaaggcagcagaatcaaaggtttatttagtccatcagcaagagaatctagatttcagatttatcttgaaattagagtaaattaaactattcctacgtgtccgtgacattaaaatgtccagagctacttatcttgttcttgttttcatctggtatttctccagatgttttcagtattatagaatgtatagaacatgattacgcaatcattcaattcggcatacttggttggaggaggagcaaataataaaccttggtaacatcccttcattcatactcctctttttttgtcttgcatttctgttaaacgcacacacatacttaggactcattcagatttttaaccaccatattccaatgctaattatggtctcttatttactggcagtggaaggctaatgtggtggtggtctcaaggattcaggaatattattcaaaagcattttgagctccatttgcctttgatgtttgcctccagtttctgacatttgcccggatgggggaaggggtagaggaggtggtcctactatttcctgaagcccagatgccgcagcacagtccgtttagagacatgttgattctattagaatttgcaggtcaaagggcagactcaactggcctggtagtttcaagcaccagggatagagtgaatagactactgtaatgacttaaagttggatttctgctgctacctactcattacgctcgtaatgtgcacgttggtcatgcagcgggtggggggattactaatcgctttgaaaggtttcatgtccacattttcctttttttttttttttttaaactgtggaaaagaagggaacagaacaaggagagtaatttgacgagaagagcattgcagttcttattttgccctgggcttgtggcatacatctattgccgttcacattttatgtgcttggattactccctcgggactcatgggaatgaagtcagaatgtgctacagtagcaagtctgctctctctgtggatggtcttcagttggtgaagctcttaaagtcagtgattaattcctctgaggttccatttctttaaactatttatatcagtattagaataggtgatctccgaggtcaggagatcgagaccatcctggctaacacggtgaaacccggtctctactaaaaatacaaaaagaaattagccgggcgtggtggcgggcgcttgtagtcccagctactcgggaggctgaggcaggagaatggcgggaacccgggaggcggagcttgcagtgagccgagatcgcgccactgcactccagtctgggcgacagagcgagactccgtctcaaaaaaaaaaaaaaaaaaaaaagaataggtgatctcaaaccactgactcagattaaaagaaattataaaaaggaatgatttctggtaatttttattttctttatagttttctgtatctttcagtttttcttcaatgactgtgtactgcttttatcagaaaatactttttgtcaaagaagcaattatatggaatagacagctattaaaataagattctttttcaatttgcttgtttttttcgttgtgaattccattccctctgaaaagcagagtatttttaacatttttgagtttagacactctcaagtgtgccttgtaaaacttaatcaggtaagttcaactataccatgtcgtcctttctaagagatgtatttgaggaacagcaattcttcttatttcctaaaagtctttgctgttactgtttactagctttcacattcttacctatcctccactttttttccaagaggtggttctccctcatagtatccacttcaaatttaccagaattgtaaccaagcgaacaatactgtctttgtcccttttggaaaataaaagaaaaacccaaaagctggtatacctatcaaagatagacattactcagaattcacatgattatgtgtacaatatataatcaaaacattttattctgttgactatgaattgcccttcttaggcacctatacatgtagcaatcaatgtcgggagcgtacgttttaaatggaaaggacaaagccatgacagtctgttagggaagttttggaggatgagagctgtggtcataggagagaaagtttgattctgtatagtccatagcatgttatcactgctcaggaaagaaacagtatcagtgaaataaaatctctatttgaattgcataaaaaatccttccaattgtgtgtcttattacaaagacattattccagtggctcagactccaatgccacgttccttaaaactttgaaattagaaatctaaattgtcatctgatatttcatattgtgatttgcaaatgtggcattttaccccagagattaactgtaccacactagctgtccaagcacaccatttatgaaagagcttggaattcagtcacgaagcttcaacaatatggaatcatttttaccatgtcatattacaatattttccttaagcataaagcaggcctcaagtccgatcacctttgtcttttgcattcagcaaaggtgctggtatttcaatctaattagatagagtaatttatctgtcattcatctgctgctgctatttcagtctatttagataatttatctgtcatacatctgctgctgcttgcctgctactaaatgtgtgattctgactattggtgcacagaaatgtagcgcccttactgggaaagcccggtgctgcttccagcttggtcagtcttcgagcttcccaaaagggaacagatgaccgcaatcaacaggaagctgcatcgttagaccatcttgaaccctttcacctttaagctcatttcgccacttaacatatttttttcaagtggtccatggatatatttagactgtcattatccctttagtgttgactggatcctcgtggtgtaagttgcctgccgtttcttagaattacgtagtgtggggacagtgcgacgaggaccttctctcctcttccagcagcaaaaccagtgaaacggatctttatttccatgatgtaaaccgagcatacatcttccactcgttagttttgctttcagagttgagtatacctacgcatccagaataaagaatagccattagaatattcagtagacagatagtcttccagtttgtggctaaactaaaactcttccatatgactgctattgaagctcaattatcttaacaaaagacagaagcaaggttaaacttgggcaatgcattctcagattcagcatttcctcaggtcaaaagctcaggccacttatatagttcctataaatcaaacatgtcttctttcataaaagatgagccgctgacaaatgcattttggattatgaaactaattgttcaccaactttgttatgattattttgtaaatttcttacatcagcctcccctctaaatccaccttttttttctttggacacaaaccataaagtaattattagctaaaccataaggaatctgtaaagtttaaattactgtttcaaagtgtgcagatcattgccaataaagccacaactgcaaacttatttgcattgatgagataaaatgaatgatcgatgttcataatgcaccaggaatagacggctgtgtctccatatccactttattaaagtttgcggttcgttgtacactgtatgcatgaaaatgttttcagtgtcagtaatgcctcaagtggtctggaagctacagaataattatcaaaggaataaattaaatggataaagtatgtaagtgacaggattagtcttacagaaagtaactttgtttacttttcaagttcaactgcaactataggaactctttaaaatataaaatgaaacactaagttcttactaatatagttttttttttttaaggttaacaatttttatttatttattttttttgaaatggggtctcagtttgtccacccatgctggagtacaatggtgccatctcagctcactgcaaccccacctcccaggctcaagagatcctcctgccttagtctcccgagtagtgagtagtgagtagctgggaccataggcgtgtgccactgcacccagctaatttttgtggggttttgccatgtcgcctaggctggtctcaaactcctggcctcaagtgatccacccgcctcagcctcccaaagtgctgggattacaggcacaagccaccacacctggcctaaatattttttaaactttattttatcgtagtaagaagacttaacgtgggatctaccctcttaatcacttaagtgtacaatgtagtatattgttaattacagggagaacgccacacagcagatctctagaacttactcatcttacgtaacttaggccttatgcccactgattagcaactccccgtttccccctctctctctcttgcaaccaccgttctactctccgtttgcgtgagtttgactattttagatacatcatgtaaatggaatcatgtagtatttgtccgtctgtgactggcttatttcacttagcctaatataggggaacttattaagatagcaatataacaacatgatacagacatgtagagtcagattagcctgaatgggattcctggctgtaccattgactccaagtgtgaacttgggcaagctgtgtaaactctgaaactcttggttttattacccttaaaatgggggtaatgataatagtaactttgaagaagtgttagaaggggtaaatcacactggtggcattttctttcttttgcaggcaagaagctcttctggctgccattagtgaaaaggatgccaatatagccctcttggagctttcgtcctctaagaaaaagacccaggaggaagtggctgcactgaagcgggagaaggatcgtctggtacagcagcttaagcagcaggtattattaaatgccaggaggagggtcagtggggccagccttcacactgtctctccacgggtctctgccagcttgtactttaaggtctcttgtttcctattagacatctgattcttggagctagtttccatcattagagactttgtacctccacaaatctgtgtctaggaaatgcagagcattcttggtaagagggctgttttggacaatgtcacaggtcttctgtgagaatgttttttaactttgtacaacggattgtagaaattagtgaaattagcccatttgacatgaaaaggcttttttttttaaacatccagcaagatttctatgatagcagcctctaaggatattttcatgaaaagattttcagttattcaggattgggtaagctctgaagataagaacaaaggttggcccttttcttttccagcctaaatgctctcaaaatttaatgctttagtattcatgtaacgccttttgtttgtgaaaataaaagctaaaattttcccctttgatgatggttgcaaggagtgtgaatgtacctaatacacaaaaccatcaacttaaaaatcgttaaaatgataacgttttatattagacatatttttccacaataaaaaaaatggggaaaaacatttccctttgaagataaggagagtgctggatgtttacatcggagccctgcttgagcttcagcgctcctcactgagtgctcctggctgtacgcagcgcccgcgtccccgcctccgtgactcctcctgcattcccagtcacgctgtctgtacattttggctgaccaggtgtgctcttctccctcaagtcgtgagaccaagaaagagcttttcaagtaaagaaagttctttttttctatttttggaggtcagtcatcaactgatggtattttggtataatgtttacattaacaagaatcaatatttaaacaacgaagttattttctctgtggatcaaattaaacctgcttagaaatagactttatatgtatttatgttgcacactttgctgagaaaataccaaaagatgtcttttttcggcaggatggatagttgacctgcaaaaagtaacccattgctcattcacaagtgaaagaaaacttttccagggacctaaaataccttttagcaagaagaggacatcatctaatattttgactacctgttatgtaaaataggaagaatgtgcttattattaaagacatccatccagtagttgaaaactgaaatttggctcatcaaggctgatcatagcaaattggaggatattattgaagaagggagttcactgctatctgagtttatatatttagcaatatcagttatcttaagtagttaggcttgaatacataggcctatgatttaagcggttcatgatcccttcacttaaggcaccaaatagaattgagtatctagcagaccagaataccgtacctcattcacagtggtttttgattactggcctctgaagaccatatgttttcgttatgtgaaaattaaggaaattggccgagcacggtggatcacgaggtcaggagatcgaggccatctggccaacatggtaaaagcccatctccactaaaaatacaaaaattagctggatgtggtggcgggcgtctgtagtcccagctacttgggaggctgaggcaggagaatcactcaagtccaggaggtgggggttgcagtgagccgagatcacgccacagcactctagcctggcgacagaatgagacaccgtctcaaaaaaaaagaaaaaagaaaaagaaaattacggaaattaattaatctgtaagcttataaccttagaaggaagtagctaagaaattctcagtgtctttatatcaaaccatatgccttgaattttctgtagtgatgtgtcctgtatacagagaaaaataataacagttctcaggagtccttcctacagccatctcctgcctcccttttacattcctgccctttcagaatgtatctggatgctgtgagcaagaaggaaggagtcttgccaaaggcatttgattctttaattcctccaagagtgtgtactaacttttggacaagggagaggccttttggaaagaggatatggcatcaatgctgttttaatttaaagcttctagtccttgaattgctggaatgtgcctcaatctaaaggctatttcctaacagggaagccgtcagctctgaccagactttccagcaaatggagctgccgccgcctgataggctctcggcgttcacatgtggttcctgtcgtcagaaagaggggaagcaatgagggatatatagatttggggttcaccttctaatatggtcccaatttacttatcccctctaaccacccccccacccccccagggtaacttgtctccttgactcattcatggcaaagcagcacttggagaggctgcatcagaggaaggggccagggccagtgaaaaaaataaaaacgaaaggctgtctaacaagctccagatgttctgtggtgggtgccaacccgtgtgttcagaccttaagtcatgaagaagccctgctgtgattgtcaggtccccgcacgagatttcgtgtaaactcagatagaaccctggaaagcactaatacaatctgtttagtcacagcagctgtcaccagatggcctttctctcagcattattttcttcttttcacctccagaattttacagcctccatgttgtactggctgctagtgtgaaatctggttttgccgctgtgtgctccacacagatgtgtcataggcaggctgggctcttcaggacaggctgggatttgttttttttttttcttcctgtttttaagagtcgactataacagtataaaagtaaaggctacaaacttaaactgatttggtttgaatctagataatctcatttacaactataattttgtaatcctctacattagaattaattgtcatataatatattctttgattccaatattttgtaggcatgggggatacaaaggcacagtactcgtcctaaaggaactcacaggctaatgcatcaaacactggttgttctagacacttggaagacattctgtattagtccgctttcgcattgctttaaagtactacctgagactgggtaatttaaagaggaggtttaattgactcacagatccacatggctggggagccctcaggaaacgtacaatcatggtggcaggtgaagaggtagcaaggcacatcttacatggtggcaggagagagggagcgatcaagcgaggaactgccacacccttttaaaccatcagatctcgtgagaactcactatcttgacaacagcaaaggggaaatctgcccgcgtgatccagtcacctcccaccaggcccctcccctgacacttggggattacagttcgaggtgaggtttgggtggggacacagagccaaatcgtatcacattctgtggaaggtagtcctggccttgccagctttttctgctgacagctttagcagctcatccaaacattatgtaacttatttacccattcacttcagatttacctcacagagttggcgtgaaattaaataagatagcaaacctaaagtgcctagaatccccacttccattctctatcactgatagccctgttcatggtgagaactgtgccgtgggtgacacacagtgcattgagggaggggtagtctcaggaagcatggctctcatgcttttttttttttttttgagacggagtttcgctcttttgcccaggctggagtgcagtggcacgatcttggcttactgcaacctccgcctcctgggttcaaacaattctctgcctcagcctcctgagtagctgggattacgagtgcccgcctccatgcccggctaattttttgtaattttaatagagacagggtttcaccatcttgaccaggctgatcctgaactcctgatctcgtgatccacccgcctctgcctcccaaagtgctgggattacaggcgtgagccaccgcccccagcctggctctaattcttggttatttctaaccactttatttaaatgtgcagactcacatagtgttcagaattatacaactagcacatggtgttccactcctctgaggaagaacgtatttctcagggcagttaggaaaaagaggtagagttactttttatccttccttttttccacctgttctttttaatgatatgactctaatatagaatttttaaaaaataattctaaattctaatatgtctttcttaaattttaaattttcgtcactgaagaacatttaaatgcccatctgcctgaagtcctcaacattaggaaaatgataactcccaagcatacatcccatctcactcgccttctagttctgtgattttccacgttacctgcctgttctaaatatccccgagtagtataacttttcataattctgtgaaaatagagcagtgacaacaatggccaccacgtaccacttgactgcagtgtgcagggcacaagggctgtatatcacaggatcttccccacagctctggatagtatcttcgttatgtagaggaagcacttcagacccaaaaacgttaaaattgtggctaaatttccatgaagactaagtggtggacccagaattagaagtgattctcttctctcccttaccatcttatgtgaagattccagatggttggtaattagattgtattagaattagaataatacaaacaatgctattttatgtttttatgatactcgtttgtttccctgagagacagaaaagggtatctatttatactccagcccttcccctctctgtcgatgaagaaccagaaacaaaagagaaatggtgtgatttgtttcccttgggtttcccttttccctgttccaggttgagcatcacctttctgtacacgaggtctttctcccgtcgtcccagcattacttccttgagattacatcaggtgatccagttggtcttgggaatgatcctgtattcttcagtcaagcattttcatagagtagttttctactgtgttatgtgtattttgcttgcttaatcctccgaagaccgcttcatttccctaatcactaagttcttgatggaaagagtatttcactattgccccaagtactttcagtaggtgtggtgtaaaaaaatacctgaatcaagtgaataatattttgcgtacctgtcttttattaacttctgtccactctctagttaacaatttttagtctctcgtggcactgcatatgatgccttgtatgatacctttactcttgttgtttcatcaggtaaagttgagtactttgacattcgctgagtaggtcgggaaacccagcctatgctctgaactggctgtttctgcggtctagcagacgttctggcacacattcacgcatctgtgaacccacatttgtacatgctttcacacttccccatccctgttagaatgctggttaccgtaataacagattcaatgctctgtccacatatcccactcagaaacaatttgtcccctaagatggactcactatcttttgattcatttatttagggttattttgctccttcgttgttagtgaatagaaaatgtatataggttaatgcctttcttattttgactttaactttcctcacatgatataggacttgccattggcccacctttaaatgactgtgtatcatctatcttttcctcctcgtggcattaaaggctactgtctactatagtagcatggtgtactaattatgaagttgtggttgaaaagacacttttatcatcaccactgtaggcacttggaactttccaaataaatcattatttggacgaaaatttcccaggcttattatttattggtacaaaggtgaataccttttggaaggttcagtaaactccctttgtttggaacttagggttatgacaacagtaaaatagtatcgtttcagctttcagttttggtggacatgtgctttgctcacagctttcatgagagaaaatgcagtttcgttattaattcttctccagccaaactcaagtcatttgctggtttgaaatgtgtcttctttactatctcagagttttgagtgaagaatataagttgttttgtatgtgaaaaatgtgatttgttcttatttactaaaatttgggaagaactggcttaacattgatctgaagaatgtaggggtcacatactttttttaaaaaaacgctcaaatctgattttcaaattcttagcccagggtcctgaccactccccattggagcaatatttaggaccaccaagctggaagacaataaataattggattcttacatgtcaaactgattgttggctctctgtagtatacatgaattgtttttgaaggaagctaaaatcctgtgaagacatactaatcatctaatatgaacccagttagatgaaaatcaccttttgggacttattctgttctatgaaaaaaaaaattatatgaaaagttctcccaactagccaagcaaatagacctgtctgtagtctacttagtgatttaaagccttttccttagaaatgaaatccatgatggaagcttcttgccaataagaataatggagaatcaacctttaaagccacatacatgacataaaatctcaagttgccattattccgtattgtcatacggaatagagagacgtggctcagttttattaactactttcccttcctttcctctgtcctatgttctgaaccaacagaggactaaattttcttacagaggcagaaagttaagacttaagatttaaggaatatgagggtagggtgtaccttgttgactgttatattattgcatctgagccttcagatgacatcctgaaataaatcgcatagttagggtattttatacctatcattatcattaggggcttcgcggttttgacaaatacactatcaaagggaagcacgtcacaaggaacacctactagcaggtcaaatattgactaatctagggagtatattgtgtgatattttggtctgatttttcactttcagtttgttgctgtaatacacatacggaatttttaaaatatatgtattttagatttatgccgtgtttgtaaattcccataaatacataaaagggccatgctaagctgtctttggggtggccacactagtgtattttcctctcacattttgccataagcagcaagaagaaaccaggcccacaccttcagcactttaactggaaatctacttagccggatctcgcagttcattcagcacattctccacttttcacacagctgcaggtgacgttgttgctaacgttctggtaccgcatatcaacgatcccagtaacaagttcttcgcttccctttaagatccagtggcagcctcctgaaaacccccatttgagcaaacagccaaaattcagggcacttgaggtttgcattagtgctctcctcagaatctttccaagtcttccagcttccgcccactgcccagttccaaagccacgctggcgtttgaagttttgttacagtgttacccccattcccagttatgccagaatctgttagttatctattactgcataaaaattactcttaacttagtggcttaaagtaatcgttattgtctcacacagtgactgagcgccaggaatctccacgcagcttagcaggtggttctgactcggggtcccttatgagtgtacagtcaggctcttggtattcagtcatctgaagggttggctagggatggaggacccacttccaaattcatttgtgaatttatttttatttttattttttattcttctttttattttttatttttattttttttattttatttgtttatttttttttggctagagagcatttattacaaacaaaattgaggtaaaagaagctgacccagaagccacgcccgcccaggctgggccatctctacttgccccacaccagtccctgagcacctcgggcccaaagcagcccccggaggacagacgtgtcctgcacactgaggtagctgcatcttaagcccctacaactccctagggttgcccagttcccacacagatccctgtctggaggggaggaggagggaggggcaggcaggtggagccctagcttcaggtggggcataccccacgccccaacaaacattccagcctcttaggctgggcgctttcctgcctgcccacccagccagccatgggacagcagggtggccaccagaggcagcgtgccagggcaagaggtcacggctgcttcgggcagtcctcggtcaccctctgggaggccaactcgaccagcacattctgcaggtagttggggttggggtagccgtggcctgtcgtgttgcagtccatctctgtcttgtggtagatctcattccacaccacagtatcgctatcacccatggtactggacgtgcccactgtgaagatgagccaccttttctagggcaccttcgggagctccaggaccttgtggccctggatgttgtctggatggtaacactggcagggaaaccctctggcagtaaatggctttccagggttggggtgctcgggtccctggatgtcatgcggaatgttgtaaactgtgaggatggtcccgcagtcctcgtggccagggagtgacatctggaaccttaacaccaccatcttcccctggagcagggtccctgttttctctccagagatgatttggctctctaccatacagactcctctgtagggttacttaggacacgagggccagcttctccagaacaagtgacccaagaaaggaagagaacaaccaaaacagaatttgcagtgtcttccataacctaacctcagaagtgacataccatcacctccgccttactctgttgatcgcacagaccagcccttatgtcctatgggagggggcagcacaatgttgcaaacacctggagacagagatccttgcagccatcctgagggctgactgccacagcaagtgcgtgaataaacaaacgtggtatgttcatgcagtgaaatgctgctcagcagtggatagaaatgaactacagacacacaacagggtggacgaatcgcaaagatacaccgagcaaaaatggagacacagaaaagtacacactgtgtgattccaccatactctgtagtgtaagaaagcaaatcagacaacaaagcagaacttacttcatcttttcttcccctcgtcagctcacttgagaggcctgcagggggaaagggacaagttccattctctttcactcctctgccttcttcatcttctgatgctgcttctctggccagcattgtttcctttggggtggagcagcagccaaaagacacaaacctgacagctctctgtaacatcacttgacccacagaaagcgcgtgcatccttgccctgccaaatggtgagaaacaggctgcctcgatacttctgtttccatctgccatctgtctcctcctcagataagcaccaggcagatcaacaagtctgatgcctgagtagatacaaaacgaaggaatgagatgtcagtctccttgacttgtactcacacccagtctttaggagtggttctctttgagccctctgtctcttagctaaggcaaagggggccttctcgtgaatgaacacacaactctccatgcgacaagtccttcttccagccttaacaccagctcacaccagtcttagatggatgtaggggcacctgctgagacattggactgctgacaatagtgccttttcggccactggccactgagctgcctttatacacgttggttgcttagctcttttttgtcacctgctttgggccttggtcaccaattctgtaacaactggaaaagcccactcatcatactattaaaactgttttacattctaaaagaagctaacagtggtagaataaaagcacagagagctcctgagttgtcagtgaataaagggaaaatcaaatagcaagtgttgtagcagcttaagtgctgcagaaattgtgggaggaaaatgttgtaaacatctgttcatctcacttggtttaaatccttgataatgaggccagcctctgagagcatttatgtactcctttgttttatatatagatctgttatttataatgccaggtgcctgttttatgactgaggagacattcctcaaaacacatctgtgttaggcactgccagggccgcttcaccttgcttgtccttgatggtgcctacgtcatactgtatctgctgtgtacatgagtatcagcctcccagctgtcctgtatggtattatctccttgagggtgactgttgttttatcctagaaaatgaaaactttgcttagaatattcagaatttgacagaagaatacaattcagaaaatacagaagattacagttcagtctacatttaataattcgatggccctttttttttaatgtacttatttatttttaatagagccagagactcactcttgcccaggctggagtgcagtgtgtaatcgtagctcctggcctcaagccatcctcccacctcgacctcccaaagtgctgagattacacacatgagccaccacaactggcctcaatggcccctactgactagttaagataaaaatgttaatcttttaaaaactattttatctcctttcaaccctaagtttgtgtatattaagtactcaaatgtatatacttcttcctctgaaccattacaaacactaagatcaactagattgttcctactgatggtatccagattgttttgaaaggagctagatgcaaaccatttttcatccactgtcctcacttctggaattgccttgcacttcctcagcttaatctctactttaaacttctcttcaaatcatcatcataggctggaatttcctagcctgaagtcagtatttttccttatcattagcaacgccattctgtccttcacatattcattttcccttgggcttaagttgaacaaatgagaagaaaggagaaagggagggagcagagagaaagagaaagaaacttttcacgtggaccagagttgttgattgtatttattctttatgttaagccaagttattcttggtgtgattatttgttcgaatctaagaattcccattctatgaccattcctgtctatttttcctgtatgtatagtgtggtagaatagaaataacactacaccgagagtctggagacctgagctctagatccgactctactgataactaagtatttaatcgtgaacgtagtaacaccgtcaaaaaatatcaaacacttcacactttacaaggtactattgggatactcaatagcgcctaaccctagggctgtatgggccaggcaggtgtcgtaaataaaaggagtgagtgaagtggtttcaggccacaggagaaagggaactgtgataaactagggaccacacattgttgtctacagaggcaggcacgtttaattccagctcttgtgaccatgttagatgtgagtcctgtgttactcaggcatccatttttccctggagaattcagatttttatataaatctctttatgtctaagtgtcggcagctaaagtattttttatttttatataaatcaggccacaaggctgatttaattttatttgttttaacacaaataaggccacaagctgcctaacttgcctctttgggctttatcttcctcatctataatattgggtggatagatcaaatgattttaaagtctaaaattcattattttctatattttgataaatcaacttatttacctgtagctgtatcatctgctaagtgctgacattaagagtttaaaaagaagcaatcaaaaagcataagaaaacatatgtaaagattgtttaactctgtctatagaaatttgctttttcatgaaagtattattttattaaaaagtattgcattttgaagatgaaaaaatcctggggtttttttttttttgaatccttcgaagaaatagatcatattttgataaagtctgcttgattggagctattgataagtaaaaagtcccgaagctgggaatgtggggaaacctggattcagcccagtctcctttcatcatctgttgcatttttttgtcataaattccagatgtaggaaaaaatccctcacaacaatttgataagactcttcccttcatttccagcatcaaatctaacttgcctttcctatcgtcaaactgctcccttttatgatgccacagggaattaatttataaatcttctgagtttcctgacccctcttgaatggtctcaatgtagataaatcaacccaggtttcctgcccgtatgctggtgccctcctctccgtttcttctgtgtccgtcaggcggtatgatttatagctgcctttcctgtgctcgttgacgttggtctgaggatctcattaagcatatgtaaaactagaaagattagtttgagggtcactccctcctccattaaacttctcttggtgggaaccagtcagaccaatatatgccaaaaatctgttcctgctgcctcttttggtctcttttgaactgttttagatactcgttaaaagcagatgtaaattagacaggtgtggtgggcgcctgtaatcccagctacttgggaggctgaggcaggagaatcacttgaacctgggaggcagaggctgccgtgaggcaagatcgcgccactgcattccagcctgggagacagaacaagactctgtcacacacacaacaaaaagcgaatgtggaattaaatgatatttgcattgaaggataataggagtggtgttaaactagaatattagctgtcactgagtgccattttcagaagctgtaatttacacgaccaaaggtactatcacatgactttctagaaaacggtattcatgccattagtcatctcaagaagataatatttaacatctaggcagctgagccctattttgagttctttctgtgaattaattcatttagtcatcactacagccctaagaagtagagttatccacattttacagagaaggaaagaggttaagtaacttgccctaagtcatgtagctcgtaagtgactgaaccaggattcagaacaaatatatcactccagagctgacattcctaatcactgtaccaaaatgtgttaccatcattacagtacgtgctttaggtgagagatttcagtagccttcggccatattattaataaccccatcgtactcagttgtaataaatagtactttaatctacccttattataaattacagtgaaaatatatatattactgtaaaggattgcccccaattttaaaaaattaattcagaatcctgacaggtcaaactgttttccaaatcttgtattaaaaagatgtcttctaattttaacaattaccttgtaaaaaattgactggattaatgaacagctgtacagccgaggacagggtaaaatgacaagctaatttttaagtagctaagttcggaaatccatgtgctaataactctaaattaccattggaaataattttgttattaaaatactattaactgtcatatatacatagacaagatgtatgcaaatatggttccaaagtattgcacggcatttattaagataccttttagccaccagcattttttttaattttaagaatcaattaatttgcgttcttaagagctcatagagatgggtgattggaaagctgttgaaaagttcatagaaaatagtgactgttgaaggaggaacatctatcatacctgaagttcaatatttttcccctatatttcaaaagttttatgaaatataagaatttaaagaaatagattgttgagctttaatactaaaacagtatttgtagtagttggttttcagggtagagaatgctgaaagttaatggtactgccagccttgctcctgaatggagcattttgaattggaaatgatgtttttcctggtcttgcataaaattgcaacctactaatgattaaatctaaaattatgggttctcagaaaataatttggaacatgtacagtctgggcctacctaacttttaactagctgattcagtagaaatatgcaaagagattgagtggatattactatgtttaaatctacataggcactttacgagcacacccaaattgcacacctgaaacaattaccaaactgtctccgagacccagatgctaaaacacttagagaagactggttggttcccagtcatggcccaaagccagtgaaggatcacaggtgcaccacgttcccctagtccaccctagtccacagtgtttaccagttcttcatttcaacttctgttacgtggaagattcttctaaatcaggttttcttccctgtcaagtttcctcacagttaccttcctatctgtcttattactgagaaacaatagccaggaagaactgaaggaaccctgtttctaaggctggttctagttcagctaatcgctatctaaggctggttctggttcagctaatcgctttctagagctctctttgtatttagacatcaagacagcagtcatagcagtgttccctgagcccgcattgtcctcctgaacggtagatgaaattaccagcagctgacttgcggctgttcttacggctgtgcaccaaaatgactgtttctcttaatacatattttaacaatctgagatgagactaagtgggtctctcacttttatgttgtctggtaagatgagccataacttaaatatccttctttttattgccataatgatataactatagcaaagtaaaagcatgagccgtgattgacagaaattgctctccttgtcagatataaagatcatttcctccattgcttaaagcttcttgcaatacagtcttttttttttttttttttgagacagagtcttgctcttttgcccaggctggagtgcagtggcatgagcttggctcactgcaacctccacctcccaggttcaggcgattctcctgcctcagcctcccgagtagctgggactacaggtgcctgccaccatgcccggctaagttttgtatttttagtagagacaaggtttcaccgtattggccagactaatctcgaactcctgaccttgtgatctgcccacctcagcctcccaaaatgttgggattacaggcctgagccactgtgcccagtcacaaaaaaaaatttaatgaaatgcatgcagccaggcacagtgacttacacctgtaatcccagcactttggggggctgaggtgggcggatcacttgaggtcaagagctcgagaccagcctggccaacatggtgaaaccctgtctctactaaaaataccaaaagtagccggccgtggtggtgcacacctgtaatcccagctactccgggaggatcggagtaggcaggaggatcgcatggacccaggaggcagagattgcagtgagccaagatcgcaccattgcactccagcctgggcaacagagcatgactttgtctcaaaaaataataataataattacatatattaaaaagtacacatgtctaagtatacatgtcagtgaaattttacacacttatgtaaccagcatctacatccaggaagcagattattgccaacaccccagcaactcgttcttacactcccttttcaggtaccatcccctgcctattcctccaagagtaactactctactgaattctgacagtattggttagttgtgtcttaaaaagtcaaaacttaaagattttatgtcaacagagcaaccagggatccagaggcagaagccaacggagccaccacaggcagagggtgtagccttgagccagaggattgttctcagaccttgaaacctagtggaattttctctgctggatttcagacttgcttggggctgatgacccctttttttcttccagtttttcccttttggaatgagaatgtctattatatactggtcccaccattgtattttggaacctgataacttgttttctgtttcgcatattgacagatggagaagatggatcctactttgtctccctcatacccaattcagattaattagatgaggagatacgggacttttgagggatgctatttagatggacttttggatttacagttgatgcggtactgggttaagatttttggggatactggaatggggtgaacatattttgtatatgggacagatattaatttggtgggactagaaggcaggctgtagtagattgaatgcaccccaaaacatatgccctccccaaacatattgcccccaaaaaacatatgtccacatccaaattcctataacctgtaaatgtaaccgtatttggatcaagggtctttgcagacgggattaaattaaggatttcaagaagagatcattcttaattatccaggtggggccctaaccctaatgacaagtccttgtgagagacagaagacagatacagaagataagtgatgtaaaggcagaggcagagattaggctgggtggctctgaaccaagaaatgtccaccgtcaccgaagccaaaagaggcaaggaaggattctcccttagcgtctccacaaggaatgtggccctgccagcaccatacttttggacttgtggccgctagaacggtgagagtgtaaatttatgttgtgttcatgttgtttgtgataatttcttatggcagctccaggaaactaacgcgtggagtaggtaacacaccttctcaagtccttcatgtatgagtatgacaagcttgttgcccctgagcgtattagggttccgctttatttgaaggagaaagataaatacattatctctgcttaatgactagcatttgttgatatatgcaaagaagacattcttaagacagcctggggcagaagaggtcaaacaatatttttggagaaagaatactaaaagactaataagagttagactcatgaatgagctagaaaaggagcctctgaggcagagggatcattgtggctgggggtgctaaagcatgaagcatcctgagatcagggagccatagaaggcttcttcttaccaagtctgcactactgggcagtgacgtgagactccagagctgggaggggacaggtcatggagatccctgtattgacaatgctgagagtagtttggacttgctcctgtaagtgatgccaagccatggagaggcttttagtctctctgatgttttcagagttttcttttatagataaatcaatcactctggcagccaatggaggaagttaaggggagcctggagtaagaagatggtaagattaaaaacagggagactgtttaagggagactgtttaagaatctattccagttatgcagatatgaaatgatgaggacaagaatacagggtagttgagatggagtaatgttttcactaggccattctgtgtatcaaacaccacctaattttagtgccttaacacagtaaacgcttatttcttggttatgcaaagtccactgcagatcttgctgactctatgaggaagttgccctccatacagcaattcagtaatccaactccacttaaaattttctagtttagctctttcagtatgaggccttcttggtgactgtggcaaaggaacaactaattggtagttcctgtgctgtttcttctatgcttgggccccaaggtcactacccgcagaccacggaccagtcagatgtctggtttggccgagtaagtggaagtggtctccctagttaaaatgggtaataaagaagaaagaccatttatggaagagaatataacacgctcctttttagtagagttgaatttgaggtgatttatacccaaatagatatgtcaagaaggccattggctagagatgttaattttggagtcatcagaacagaaatactagttaaacccatgaaaatgaaatagcttacttaagagagaatataggcaagtcatactttttactgttttctgacacatactaaaatattaatacaggccattattgtcatccttatagattatagctcaattagcatatgccctctgtaagcctgttggtaatggatttcagaactggctctactggatatgcgttgctagaagttttcatgcagttctagggtttttaagacctttttttttcacgtcttacatgtgttgaaaatgctttaagcatttatggcacaatatatcacaagtgattgtgatcttatataccgcatagccattttgctgttttgatatataaattaataaaactctgttcctggaaatgaggataatgctacatgaatactccaaagagttaacataaaagtattcttgaaaagcactcccttaagaaaggaattctgtccaaatgctattgattccagggtattttgtctattttcctttaaagcaccttacattaaaaaatatgttttgcattcagtctctaagcaaaaatatgtagtgcctttaagacgggcggatcacgaggtcaggagatcgagaccatcctggctaacacggtgaaaccccatctctactaaaaaatacaaaaaactagccgggcgaagtggcgggcgcctgtggtcccagctactcgggaggctgaggcaggagaatggcgtaaacccgggaggcggagcttgcagtgagctgagatccggccactgcactccagcctgggtgacagagccagactcagtctcaaaaaaaaaaaaaaaaagaaacaacaaaaaactcttgagtcagtttatctgtccattttaagtgacacacttatttcatgaactaattaaacttgtcattaaggcttcattaatttcctctccactcctggggtgggatggttgaatcagagcggggctgtgtgtgtctggaaatgacctttgtatagttgggtgggaaattatacttcaaaataccagtagacattttatttaaaattttgttttctttggtagattatttccttctaattatagtagtaaacactggtatgttatgattagtgattagcttataacaaacatctaaacagggataagtcagcctgtttagtgataaacctgtcttttgatataattagaactgatcactagccactatgtctctgtttctaggacagtgtaacccacagtgacataaattaaatttcttaaaaaatcaaggatgcagtaaataccaactgtccattaatattgattaataaatcaatacatttttaaaataatagtttaatttttcaaattgataaaagtaaaaattgctaaattgatatattactgagttaataaaattaacatttattattaatctaaatgagaaggtgaaacatgggacaaagaatgaatttttctgaacctaaaaactggaaggaaagtcaaaagtacttaccagaacatgcttaggatgcccagaggtattgtcagttcatctcccggaggcgggggtagtttcgtcaccaccaaaataaaactgtggtcaaaccatgagttttggagtattaaatgaaccccgttgtggattcactatggtcaaattactacaagaactaggactggaataggttgccctgccctagaagtttcctagttgattgagttgaggtcacttccagacacacacagtcccactctgattcaaccatcccactccaggaatggagaggaaattaatgaagccttaatgacaagtttgatgagggagggagcaactatgttggcatgtcttctaaggagctgtttctgacttctagtgcccagcagtagtccaactatggtagctaatcagctgctgcccagttacctaaccctgttggcaagatgaatgttttagttccctgctgtgcctttaatcataattgtcttttattcattcagtttgaggtcgtcttggttcttgggatgttgagtgattctcagttgaaacctggacattttggatgttatgctgtatgactctgggtcttacttagacttctgttttagctggttttcttttgacaccactccagcaggagaagattgggatgctgcctcagtgttgcccagtggaggtagaagtccgggttccccacttgggccctgctgacagtcaaagggtagaggctccttgttactcctagctggagatgggcgttcatgtccccactaggcttcactgatgtatccctgcctggttggggtaggagggcctccagtaacaccgtgtgggtgaaggaagtggggcctagttactgctgtgcagtagtggaggtcctgactctccactaggagacacggctgttactgctccatggggatggaattctagaaccctcacctagtctccagtgacactgtggaggggagacttcattgccgacagatggaaattaaagccctgcctccctcggctttccctgacaccttccagtggagcagggagaggctgaagcacctcctcacaacctagttagcatggggcctgctgtttggtctttactgacatgagtcacagtggaccacagtgttttgtgtggtgtttggagtaaagtgattattgtcccacaggtttctatcttgctaggcagtccctttcctttagaggcttctttggctagagagagtgggtttctgttgaggctttttttgtctgtgcctgttggtatttccaggttgtcagcttcttcagctccacacctgaatatataaggcaaaaagaaggtccagggagctgcaggtcacagcactcctgactggtctgccttctctctgcctttttaatgtttctctctgtgtgtatagttattgttgtacttttatacttagtgtgctggagaaaaaaaaatattcctgatacttcttaaagacagtaaggcagacgctattcaggggaccactgagatgaggatttgtgttacaggacagagatcaggctcaactgagaatacatgaggaccaatggagatatgtagccaaggagcagggtgggggtcagtgatggaaaattactaagaagacacgtcatggctggaggattcttgccagacctactcaagaggagttgctgaagacaagccagagagatgacatattgatagcaggagatgaggaatttgatcagatctcatgagtgatcagatgtcaagcctggggatttatttttgaaggaagacttaagcaaactaccttttctctttaggaaaacaaaatgtatgttctgggcttaggtatataagtaatcagtaggttgaattttaatgcttacattcagataaccaatttttttaagttacaattttcattactacctcatcccttagccgcagtcacatatttacatgttttggaaaaccatacctctggcagcagttgagttttgatgtctagtatcattgctttattcagcttctaattcattttaagtggtccttaatggatattcatttctgatcagaatcaatctgtacctgatacttgtgtatttctagaaatcaaagtttttcaaatacttgcatttataaaattataagtggaaatatttcagtaactatgaagagatagatcatttaaaatacttttctaaagtggaaatatttcaacaactatgaagagatagatcatttaagatacttttctgtaacaacttttttaagaaaagcctgattttaataaatggtaattttctggttttttcttctacacaaaagactgaaggccatttatctcagttgtacaaaaaagaaactttggagaatagagaaaaaataaagaatgcaatagtagttgtgggaaaattttaaaatgtaaccacatgtatgtttgtacaaatacgtatacacagataaatcctttagtcagagaataggaggaaaaagtggtattggagagtatggccttttatcatttgctttcatttcatttgctttcaatctgaatggttcagtaagaatctaaaaatgcttttatatcctctgggttcatttaaagaaagacacttcactgtatgtacacacaggtgtatagttggtttacgttttgagtcaattatattcttttcttaccacatatggaccatgattttgtaaaaagaagagataaaattccctcagaacttctagctttaagaactttgggcatggtggcttacgtctgtaaccccaacactttgggaaaccaaaaggcaagaggatcacttgagcccaggagttcgtgaccagcctgagcaacatgtggaaacctcatctctacacaacaaaaaattttaaaattagctgggcgtggtggtgcctatctgtagtcccagcccttaggaagctgagatgggaagatcacttgagcccaggaggtcaaggttgcagtgagctgtgactgtgctactgcacttcagcctgggcgacagaggagaccctgtctcaatttaaatataaaaagaacttttattcttgtgatctcaagtgttttttttttttcctttagagagagcatgtgtgtgtgtgtgcacgcgcgtgtgtgtgaagtgcttggattcttgaagatcactttctctgcttagctgttcttcaagcaggataaaatatgctgtatttgtgtgattgtaaaaagcattaagcagtttaatttctgtgtatttagtaaggaaatgatcatacttaaaaaaaacttttttttttagaaatagggtctcccactatcacataggctggtgtgcagtggcataatcatagcttatgatagcctcaaacacctggcctcaagctgtcctctcacctcagcctccaaagtagctgggacaacaggtgcccaccaccatgcccagctaattaaaaaacaatttttttttttatagaggcagagtcttgctacattgcccaggctggtcttgcactcttggcctcaagagatcctcccacctcaacctcccaaaatgctagtgttacaggtgtaagccaccattcctgccctgtacttttatttgaagaggaaatactaaacttatctactttgcagtaataaaatagttgggttggggtgcagcttgtgccaccatccttgagaagatgtttttttagcttgcattttaacaccatgtaaaatcacacacaaaaatgatctgttagctgtgaagaaatttagtatcacttcttgttttcatggcctctgtatctgtaaaatacaactgtatactcagtgatatggtttggctttgtgtccccaaccaaatctcgtgttgattgttattcgcagtgttgaagaaggggcctggtgagaggtgattggatcgtgggggcggcattcctccatgttgttctcgtgatagtgagtgagttctcatgagatctgatggtttaaaagtgtgcgacacttcccccgtcgcctgtgctcccactctctcctgccaccatgtagaaaaggtgcttgcttccccttcgccttccgccatgattgtaagtttcctgaggccttccagtcatgtttcctgtgaagcctgagggactgagtcaattgaacctattttcttcctaaattacccagtctcaggtagttcttcacagcagtgtgcaaggggactgataaactcagccactcagataacctaaattacagacaaactgcggtaaatgttcttggatcctggccattgttgactgatttttagaataacagaaaatagttgcctacattttcttcttttctttagatatggtgttgagtctcactggatccagttaataattccctttaaacattctgttctttgagaacagatacagctgggagaaatgatcctatgacattaaaactagaattggattgcgttaggtttattcccaggatgtgagagctgtagcacgaagtgtggcagtgatcaggagcagaggctcaaccactctgtgtttgaacagtttcatgttagatcctgcagtgggccattataggcaaattggcccacaagatatttcactcctggaacttaagttcatgacctacttttaggaatggctttttagatctgactgttactttttcgccagaatgtgccaaaattatataccatggccttgccagaaaacaggaaatctttcaaaaattgggaatggaatagaaattttgtaattttttttttcagttttagaatgttgaatatgtttttatccttgtgttaatacatgtttgaagagagaaaatataggctgctcttctccagagttcaaagttaaaatctgcacagcatatgggaaagtgctaaatatacatggtaattggaattaaccattaagatgaacatactcattctggcagctaagaaggaatatcttcagctcagggaaaactgtaagctatgtttatacgtctgcccaggtaggttatgtgtctgtgttatagaaaccaggaatcccatacaggcatttctaaggattacgaaaatggtcatgatgagatggaagagaacagtttctaaagaatgagcagatagacaaaaaaaaaaaaagtttttcctttgctttctaccaagagagggggaaaaaaaagtagttttcatgggaaatacagaatatgttgcaagaacagatgtcttgggagcttaattccataaatggtgatgtgcccaagaataccctgagataagaagaaaaacttcatggagtctttaaaaaaataaaataaaatcactgagtcctaaagtaaataagtgaatatccataatcaaaaagtttccttttcatattaaatctatttgtgtggaaggaaatgaaggagaaaactttataaatacttgtaaactggagtccctggattctagagttcttttttgaaaccagttataaggaaccgaaattgtctttttatctgagaaaaaactgctagttaaaatgtctattttctttgcttttgactgagataactcattgtggtaacactgggttttaaatactgataggtaactatatatctatttttgattaataaagaggaaaatgaattatttaataaaggaagttttatagaaaaagcattcaaaatgttaaactcattgccaaaaatatatatatagtccttaatggtaggaaaggtgggagctacaaacctatcattgttttgtaccaatcatggaaaattgattcttgaattcaacaaacatatatattaaggattttatctgtgctggcaattttactaggtactgagttgatagaaagatgaatgagactctgtcacagccctcataaactcaaatctattggaagaaaagttatgtaaacagatgattataatctgtttcagatagcaccgaaagccttttgtcccaaacctcaagaagctggataagcttataccacttctaaaaatgtgtgatgtgtggttgagctcatgtgagagaatgatgtcagaatcgaggagggggctgaaagataaagatgaggtatgtgagcctgtgcaacagctgcccaggggctggcagacctagttacgactagaacttgggtttacaaaatgcctctacagagaatgaagtgaggcattgggctcacaagaggtggggagttggaactgaacctctgctgaagatgggtcagttagaggcttgatgtacagaaaagcaagactccttcagtcaaacttctacccgtgatagatgacaaaggagcttttctgtgccctgactctgggaaggagcccggagtcggctctaagaaatccaagttatcaagcctgtaccttccccgggtttagactaaaaatttatgtcaccacttgtctgggaagttcctgcctgaagatcacaaagaaagacatgtacatggtccttaaacacatgaaaagatgctcagctcattcatagtaagataatggcaaactgaggtgctatttagccaaaatcgagaatttaacagcacactcagttaagcgggctgtgctgattgggaactctgagactctactggtgggaatgcaaaatgtagacctcttatagaggcagtctggcagtgggtagtaaaatgcttatctgtgcattgactttttcacccagaaacgctttactcctaggaattggtcccacagacacatcttcaaaaaagcaaaataacatatacacaggataattcattgctatggtatttgtaatagcaacaggttcaaaataacccattgtgctacagtgggatatttgttgtcaattatagtacatccaacagagtggaatactgtccagctgtagaaaggaatgagaaagatctctattgatacggagtgattcccagaacatactgttaagtgaaaaagcaagatgcagaataatgtatttaacatattactttttacgtaagaaaaggggtaacgtgcaattatatgagtatatgattgctaataattgcaagaagaaacaattgaaggataaatcaaaaatgtacccaaaaaggttacctataaaaaggagggaacaggatagaggagatggggtggaagcaagccttctgtgattatacctagttacgtagttttgactctagaatcaaatgaatatattacataatcaaaaataaaattagatcagaaaaaaggaaaaaaagcagtccttgaaatttaaaaacaaacaaacaaatgaatctaattatatattaaattgttgacattcactttgagcagataatgatttcagctaactttataatacggatttttctctgtacatcttagtagggtaaactccaagtaaaagaacaaaaatgcaaagttttttttttttttaatggtctcgctctgcctcccaggctggagtgcagtggcacagtcaccactcgctgcagcctcaacctcccaggctcaattgatcctcccaccttagcctcccaagtcgctgggactgcaggcgcgtgccaccgtgtctggctagtttttgcattttttgtagagatggggtttcaccatgttgcccaggctggtctcaaactcctgggctcaagtgatcctccctcctcagcctcccaaagtgctgggattgtagacatgagccaccgcgcctagcccagataaattgtagagttcatcctgaaggcatattggtagtaattgtattggttttggtattttaaaagcactatattgttagataaaacaaataacaagtaattatgttattgttggaaaccaaaatttttcagcataagagaaaaaaatataaagtgtaaaatcaaagtagtttagtaaacccagtcttcaagattgagatctgtaatcttaaatctaaatataaaacataactattaactaataattttctcccttttaaaaaaatacttatttcctatctctgactgaaccagactagaagaaatgataaataataaacaccccagcagcagtaaacatcccagcacccggattgtggtttcccacttagtctgtatatggtatgctgctataacaaaatcagtaggtcagtaatttgtaaagaacataaatttatttttatcacagttctggaactggaaagtctaagagcaaggcaccagcaggtttgattgttggcaagggctgcttttggcttttaagacggtaccttgttgccgtatcctccagaggacagggaagctgtgtcctcgcacacatctattcctttactcatttgtttatttaatgagttctctagtaaacttcagtgctgacatatcagtttactttgctcctactttttctttttctttttttgagacaaggtctcactctgtcaaccaggctggagaacaatggtgtgatcatgacccaaggcagccttgaccttctgggctcaagcagtcctcctgcctcagcctccaaagtagctgggactacacacaagcatgtgacatcatgcccagcgattttttttattttttttattttttgtggaaacagggtctggttatgttgcccaggctggtctcaaacttgtaggttcaagtagtcctcccacctcagcattacaaagtgctgggattacaggtgtgagccaccatgcctggcctctcttactactttttaagagcaaaaggattatttactcacatggctgcacattggcttattttatatacctttattgagatatgattctcatcccatgcaatttacccatttaaaatatgccattccatattgcttagtaaattacagaaacgtgtaaccatcactacaatatcctattttttaaagtatatttttctagtgttatttcagtgtcatcgctttttatgtattaaatacattttgacaaattgaaagcattactgattttgctgctcacattgttcagtttatccattgtccctttcccccaggcctggcaaccgctggtctgctttctatcgctacagatttgcctgttctggagatttcatataagtgaaataatatactatgttgccttttgcatgacctctttaacttagcataacgttttcaaggttcattcatatctgtagcatgtcagtacttcattcctttttatgactaatagctcattatatggatataccagattttatgtatccattcataagttgttggatatttgggttgtttctctttttttactataataaataatgatgccgtgaacatttgtgggtacttttttgcatggaaacatgtttccagttatcttgagtatatacctcggattggaactgctaagtcatatggtaattgtttgtttgccattttaaggaactaccaaaatgttttgcaaagagactgtaccactctacaatcccaccagcaatatatgaccatccctacacattctcaccaacacttgttattgacttttaatagccaccctggtggatgtgatgtggtatctcattgtggggttttgttagttttgctgtatattttattgcttctccgttgttcccgtagatcattgtggctttgagacgcatttccctattgaggttgcacatcttttctttttttttttttttttgagacggagtctcgcgctgtgtcacccaggctggagtgcagtggcgcgatctcggctcactgcaagctccgcctcccaggttcacgccattctcttgcctcagcctccgagtagctgggactacaggcgcccaccaccacgcccggctagttttttgtatttttttagtagagacggggtttcactgtgttagccaggatggtctcgatctcctgacctcgtgatccacccgcctcggcctcccaaagtgctgggattacaggcttgagccaccgcgcccggccagaggttgcacatcttttcttctgcttactgcctatttgtaaatcctcttgttgattgaaaagattcaaatcctttgctcatttgtaattggggtatttgtatttttattgagttgtaagagttacagacacaagtcctttatcatatatatgatttataaatatgttctcccatcctgtcgttctcttttcactttcttgttgatatcgtttacagcataaaattttataaagtttaatgtgttccaatttattttttttttcttttgccacttttgctctttgggtatctcatctaagaaatcactgcctaacccaggaagatttactcttacgttttgttctaagagttttatagttttagctcttacatttaggtgtttagccaattctgagtttattcatttatatgttctgagacataatgagtttgacatcattttctttgcatgtccatttctgtttgccccacaccattgcatgaaaagagcattctctcccattagattgtcttggtgctcttgttggaaatcagttgaccacaaacaattacggtttgtttctggactctcaattttgtttctttgatttctttgtccatctttattccgataacacactgtaggtaaaaacctactttaccgtaggctctgaaatcaggaagtatgagtcttcctaactttattcttctcaattaatattgcgttggctatttttgtgttattttataaaaccccatgtgaatttacaattctctcaaaataaaaattgaagaagtagtaatagaagtagcactagtagtagtagtagtcatagtggtagaagaggaaatgctgtagcaaataaagggaagggaggataaaggaaacaagtagagtaatagaatagtttctgaaggaggacatggatatatgggttgttgttttgttttttttttttctatcttcttgtgtatgtttggaaattctcaatataaaatgtaattcttttagttttaaaaggagaaaggctctaaagctagactgtttgtattagagctctagcctgtgacttattcatcatatgaatgtcacaaagttatttaggctctctgtagctcagtttttcatttataaaatcgacatgaaaattgtaccaacttcatattgttatgaagattaaattacctaaagctcttagaataatgcttggcacatagtaagtattcaataaatgttggcttggaaagtgactatttttgaaaggagggtggttaaaaaaagaaaaaaaagaccatttttaaaagtacatgtagatttaccagataatcaataaatctagtcattcaattaaaaacttagtggcaagttaacatatatgaaaggagaattaataaacttgaagataacagtgcaaaaaatatccaaaatacagtgcagaaggaaaaaacaaaattgaaaatatcaaagagagactaggagacatggaaaacagactgagaaggtacattcacctgataggaattttgagaaagatcatacagaaaattcagaaggaccaatattgcaaaataggaaagtatacatttaaaaatttggaaattacaaattttgcaaattagaaaataaggaaattgcaaatattgtaaaaaacagaaattgcaaaatatttagaacagggaaaacactatatatcaaaatttgtgatatactgctaaagcagttcttggaggaaaatttgtcttaacacatatataaaattgaaaattaaaaggcggggcacggtggcttacgccgtaatcccagcactttgggaggccaaggtgggtggatcacttgagatcaggaacttgtaatctcagctactcgggaggctgaggcaggagaatcgcttgaacccagaggttgtagtgagctgagatcgcaccactgcactccagcctgggcggcagagagagagactctctcaaagaaaagaaagaaggaaagaaaggaaaaaagaaagaaaattaatgagctaaaagtatccaaatcaagaaatagagaaagaacatctgtgtaacccccagcacacacacaagaaaaaagaagaaagaaaataaaaacagaaattaaatgaaatagaaaacaagctatagagaagatcagtgaaactaaaagctggttcttggagaaaacacacaagatagataggatttaatgacttaattagatgtgaaatatatagtgggacagattgttcatgaagaaaagaccagatattataataattttaacagtgacttaatctgatgtcccttcagacttctattattagagaattaattagtctgcttttattctggttaacagaacctgcaactgaactctcagattttttttttatcagtagtaaaacgtaaatctgattagaatttaaactttttcttttaatagctgggtttggataacctatcctgtttcttagcttatgtattcttctgtgaaatatggtttctgtttggacattgacatttttgtcttagaagaaaagataaacagaatagacaactgattcctttttcctctgggagggtgtgtatacctggatacacagatatgcattgatagctaaagaagtctatttcagcaagtttcttccttcttcccttcttccttttttttttttttccttccttccttccttcaggacatctgattctttatgtcgttgggaccaagggtttcttctgcctgcacatgcacctggcatggttcaagaggaaaaacatttggatataaaatatctttcacgtcagtaaaacatgaaggaatcactccttttgctttttggtcttatcttgagaagagcatactgtgagagccccttaagagcgcagtcatttctatgatctgtgtaacatctgatgctctgtgagctgtcagatatttagtgctcaatatcataactatgcagggaacagacttcacaccaagtttcttcatactagacctaggaacactaaactttgatcatcttcatgtcttttggaaatggagaagtaagttcttacaactatttttttcattctgtgacgtggatcaaataagtaatctttggtcttatctgtccacttggatcagtttcttcaggcaggcatacatactcattcctaagaagcactttaaatgcattctgccttgaaaatggatttgtgtgtgctttattaggatttctttttaagtttttaaacttatgctagatatcagatattaaagattgtctcatgttctaagaaaataactagccgagtatactttcacccacattcctattaaagtcaacatggaaaggtttcttaaccaattgaatgacatgatacagatgttttgctcactttctctaggtgcctctttgctttcttctattttccttttttcctgagagctgcttgcagaagactttgccaagagataccacatgccataagaaaaattagcctacatcttttcaaaattgtcttagtccattcagactgctgtaacaaaataacatagactgagtaatttataaacaacagaagtttattgctcaccattttggagaccagaagtgcaagatcaaggcagcagcagattcggtgtctgatgcaggcttgctctcgacttcacagatagtgctgcttcgcatcttcacactgcggaagggcgaacaggctccctcgggcctttttttttccccaagtataatggatacgtttatttacttatccatttatttattcattcatttgcaattatcctttaagcaactactgtttgcaaaaataaaaagtatgttatttgccaccagtttgataaaggagataacagttctatatgaaaacatctatagttggtctcacaagcaaagtgtgctgggagagcaaaaacagaagaaaaaaattattttcatattttctcttttgagtgacacactatcctcattaggagttcggtttcctaccagtgatacaactagatatttacatctcccaaatcaaagtacaaactttggcagtagaaccttgttgctcattattttctttttattttcaagttttattttggattctggggatacatatacatgtttgttacctgggtatattgcatgataccctcaggccttttttataaaggtactaatctcattcatgagggttccaccctctgacctaatcatctccaaacggccccatttcataatgccaccaaattgaaggttgtttcaacatctaaatttgggggaagccgagcgcagtggttcatgcctgtaaacccagcactttgggaggctgaggcgggctgatcacttgaggtcaggagtttgagactagccaggccaacatagcaaaacccgtttctactaaaaatacaaaaacaattagccactgtggtggtgtgttcctctaatcctagctacttgggaggctaaggcaaaagaattgcttgagcccgggaggcagaagttgcagtgagccgagatcttgcctgggcaagagaacgagactccggctcaaaaaaacaataaattaattaaaataaaataaattggggggggaacacaaacattcagaccatagcaaaggtcactgggggtcctcccagaaaagagaaatttgattcacagatgatttattaataggtttttttttttctgtcgttatatactagagggaggaactgactttaaaatgtgcttacattataggtgaaaatgtaaagaacctaaatcttcaacaatatgggactcactaaaaatccattcaggggactaggcgcagttgctcacgcctgtaatcccagcactttgggaggcagaggcaggcagattatatgaggtcaggagctcgagaccagccaggccaacatggtgaaacccatctctattaaaaatacaaaaatcagccaggcttggtggcagccgcccgtaatcccaggtatactcgggaggctgaggcaggaaggagaatcactcgaacccaggaggcgaaggttacagtgaactgagatcgcaccattgcactccagtccaggtgacagagcaagactccatctcaaaaaaaaatacctaaataaatggatatccattcagctgaatgctgtgcaaccagttaaaagtagattttaggctggtcacagtggtcatgcctgtaatcccaactcttggagaggccaggacaggaggatcacttaaggccaggagtttaagaccagcccaggcaacatagtgagaccccatttctacagtttctaaaaaaatacataaactttctaaaaccaaaaaataaatatatacacatacacatacatatacacatatacatatatatgtaattttttaaagcaatattttaaaatactatttaatgacatgaaaaaatggtctcgactatgatgatagctaaaatgtactgggtgtcagttttatgccaggcacctttttaagtgttttccttgtgttaattcaacaggttaatactcgcaacagtcttttgtaggagaaactattgttatccctattttaaaggtgagaaaactgaggctcacagcatttacgtagtttgcctgcagtcaactggtgagagacagagctagaatttaaactcaggcaatttggctcttttaaagccctcgcttagacatcattacatatctctgtaaatttttttatgaaactagacaaactatttttaattcatctagaaaagaaaatgtgttaaaaataaccaatcaaattttgacgcagtagaattggtgaacatattctaccaggtaggaaaatatgctataagatatagtaatttttaaaatatcacagtgtagctgaaatagagaagaaaggccgggtgcggtggctcatgcctataatcccagcacttcgggatgctgaggccggcggatcatgaggtcaggagatcgagaccatcctggctaacacggtgaaaccctgtctctactaaaaatatgaaaaaattagctgggcgtggtggcaggcgcctgtagtcccagctacttgggaggctgaggcaggagaatggtgtgaacccaggaggcggagcttgcagtgagctgagatagtgccactgggcgacagagcgagactccatctcaaaaaaaaaaaaaatagagaagaaatagaataaatcagaagagcatgccactttttatgttcacagggaggagactaaatgaatacacttaagagtgataatcactgatagaggaattatagatgatttttctttcatttctcttttttgtttgtactttatttttttaattttatataatgccagaagttcaagaccagcctagacaacatagtgagaccctgtctctacttagctgggtgtggtggtgcatacctgtagtcccagctactcaggaagctgagttgggaggatcacttgagcccaggagtctgaggttgtagtgagcagtgattatgccactgtactatagagcctgggtgacagaatgagactctttctaaaatataacaaagaaaacccaaattatctgtagtaagcatttttaaatcatacaatattagcaagtttatttttaatgctttaaaacttcaagttttaacagtattttactagtgtaacatattgctgcttgattttatgcatcgtgtaccctggcattttctaagctgcttactctgcagagttaatttcctaaaatgttcaatatattattcatttattcaaggcctaaattaaccacccacacagaaccactaatccagtcttcgtttttggtaaagacagagagaagacaatgggatcatagtcgtcttctggcttagggttgaggagaaggatttcagaactttttaccaattttttttttctttttacctatttttaagacccgaattgtttattgatggtataaagaaaagctatctgtgtgtgtgtgtgtgtgtgtgtgtgtatgagagagagcgcgctgctgtctaaatacctcactgaactctgtagtaaattgtaatagttgttcaattgattttttagtgagaatgtgtctctaccaaagaaaattttaaaattagtcaagcatggtggcatgtacctgagctgctcgggaagctgaggccagcttgaggccaggagcttgagacaagcctgggcaatatagtgaaacccttttttttaaaaaaaaaaaaaaaaaaaaagagagaattcatgaaatgcttgttttggggatattgcttcctcttcccccaaaatttctgtatcaatgtaactgccagtcttagcccaagctgctgtaatagaatgccatgaactgggtagcttaatcaaacagaaatttattttctcacagtttggtgattgggaagtccgaaatcaaggtagtgtttggtgcagttcctagtgaaggctcctcctggctcgcagaggctgcctagttactggatcctcatatggcagagaaataaagagaaatctctttttctcttcctcttcttacaaagcccaatcctatcagattaaggccccacccttatgccctcgtttaaccttaattacttcctgaagaccctgtccctgggtttggtgacattggggtctaggagttctacacgtgaattttgcgggggcacaattcagcccatagtagtgcctaaactctttccagtatcctcagaaatcctatatttagtttattttattgcagacaggattagttttatcctttcttgtgaaactcttaaaatactcattactttacagtgtgtcatagaaactttacttaaatttaaccttatgaataatttcttcctagacgcaaaatcgaatgaagctaatggccgacaactacgaggatgaccacttcaaatcctcccattccaatcagacaaatcacaagccctccccagaccaggtaagatggctctgcagtgttttattaaaaaacccacacacttaaattttgagatgttttgtactggcatgttgcaaattctaagatacaagttagaagaagaaaaataaatagaataataaataataataaataaaaagaatattcttttcaaaaaaatcacagattcagtttctttataggaagttggtgattctaaatattttaagagcagatacttgaaagatttgaaaaataaagaatccttgaattgggttgagaaaaaaaattaactttctcagagatacgtactaataatatataatttttaactgtctttactaatttttaactgtcttgattttccttttaaagaaatagttccttattagaaaaacaagactctttccttgcaagcctagtgaggcacagtttttaggttatttctgtttaattgcaaattatgaactctctgctcattacctattaaaagtgaagattgaaacttagttcttcactccctgtccttgtggatccctccagcatgtcatgcttaaggaaaattgtggtcttcaacttctcatcaatgcaaaagagacattgatgaatctgaagggaaccatgttcaatttctagtttcttggaaaaagggaactctcctcaaatcttgaaaatgatggatgggagagagtgctgaacagattacctcatatcccattgccaaaaatcaaatgttaacatctctatcacacccagccttaaaatatatagctaaggggaaaaaaaaaaagtcaagtaattacatacatatgactaaagcatcaaggaagactttcctgctaaacatctctactaaataatagctatgacattgtcttagcagaagcagcagagagagtgcagatgaaagcagcaatggtattcaaattgctgttgcttctaagattcagaaggtatagtccgtcctgttatgatgacatttactaagccagttgaggcaagccttgtattttagaaggaaaacagtataaatatgtaatgtgggcagaatggagagctatctgcctggtgtcagcagtctttccctgccaagagatcattttaccttttctgcctgctccctgatacctggaactgaatctatgccgggggatataagatgcatgtttgattcctcatgaaaacaggtttttgataatatagagaaccggatgtctggagtaggaagagggaaacagagaaaggttgaaggaaaagcaaaacataaggaaaaacctccaacttgataattttgcccagatccagccctgagatagagatggcatcttggaaagtaggaagaatagaagtataagacaaactacagttgttcctcagtatcctcggggggttggtttcaggacaaacccactcacaaataccaaaatccatggttgctcaagtcccttatataaaatggcatggtatttgcatataagctatacacatcctcccgtgtacttttgttttgtttagttttgttttgttttgttttgtttttgagacggagtcttgctctgttgcccaggctggagtgcagtggcataatctcagctcactgcaacctctgcctcctgggttcaagtgattctccggcctcagccttctgagtagctgggattacaggcacctgccaccatgcctggctaatttctgtattttagtagagacagggtttcaccatattggccaggctggtctcgaactcctgacctcaggtgatctgcccgccttggcctcccaaagtgctgggattacaggtatgagccaccgcgcccagaccctcccatatactttaaatcatctctagattacttataacctaatacaatgtaaatactgtgtaaatagttgttatactgtatttttaaaaatttattgtattaatgcattgttatttttattgatttttatatatatgtatgtatatgtatatatttcgtccacggttggttgaatccacagatgtggaacccgcagatacagaggaccgacagtaactactaattttgatagtttagggaattagaatctgtttaagagagtcaagaaattatcttctgcgacgttatgcttacgtctttgttttaaatactaaccacctctttttcattccatgctgctctggggcattgccccttgtcatctctctccctgtaggatgaggaggagggtatatgggcatagccaatcagaggctcttagttcagccattttgttcagaacggtgagaaacagctttccttgactacagaaatggtttttgtttgttttcatttttctttttacacagtaactctcacatctcatttctctgtaattcatgaaatcctggtgtgctttctgttttttcattttcacgtgatttttgtgtgtattgctgtgctgctgacatagtggggtttggattttgtggctttttttttttttttttctcgttgtgtgttaatagtcacttctataattgcttttcatacatttttgggagaacttctaggacatgtaactaaatttctccagttctgattttatttattaccctttctagggtgattttacagtgtcctggcaaggtttatagtaactttatatgaaactggcaatagaaaattgaacaagtactttgcccattggcctaagtttgacatatactttttatgatgattaattaatggtgtttaaaaaaaaactgtgctatgaactaaaacctccttttgtttctatctgtagaagaattagctctcacagtcagcacctcggatgcatcccctggggctttgatgttaccctcaaactatccctaaaaatagggaggagcaaagtaaaggaagaccttttttagaagtcattctaaaaattcttttctctccgttttcatggattgctgctgtgttcaacagttgccaggacactgtcttgattctccttttcagaccacttggctggaaagtatcgtccagctgtggcagtatctccctttgatctgatgcccttgaggtttgactaaggaaatccttttcttagaaaaactaacaattatgattaatacgttcacacatattggtggccttgcaccctggattcactgcccatgcttatcagtgatctcactcccttggagtcagttctccctgaaatgtctttgtcttgatgttaaactgcttaaaatgatgaggacatgtgtagacctcttaactgttgaacacaaccaagaaggatggagaggtaagttgtggaaaggggcaatgcactgtgaggtgggaaactgtccagatggctttatcctgagggcatgaatgaggctgaaatgcactggatcggccaggtgtggtggctcacacctgtaatcccagcactttgggaggccaaggtgggtggatcacgaggtcaggagatcgaggccatcctggctaacacagtgaaaccctgtctctactaaaaatacaaaaaaaccagccgggcaaggtggcggcgcctgcagtcccagctactcgggaggctgaggcaggagaatggcgtgaacccgggaggcggagcttgcagtgagccaagatcaggccactgcaccccagcctgagcaacagagcaagactccgtctcaaaacaaaaaaaaaagaaatgcactggatcaaccagaaagctcttcaggttagaatgctgcatgtcagagaaagttaacgctgagagcaatcagtgcgctgatttatctgcactctacaagggtaggtattcgtcatcatcaagcatgtgaggccatgcagtagctgggtgtggtttactggtctcttagaaatgagcatttctctaccttgtctattttgtcagaacacaggagcttcttagcttccctgagctggaagcaccacacacgtggacatgattacctttttgttgcaaatcctttttctggccaatcagaggaagcctgttggtattccaggaaacaggcccataggtaacttcaccaggagactaaaaagtaaacaaaccagcacataaacttgttcctgaaatcttcattttcctttctctaccaaaatgaaataactcttagctttttccaattatcacactgttgagcatattgcactaatatattaactttcactggtttaacaccatgcaattgtagccggccataactggagtttctatgatatggagtttccaattttataaaatgtgctgtaaacctcattatatgataaggattttacctgaagaagtgcatgagtgacccttaaaacactgcagaagttttgagtggctatccactttccttctcctgtttccttactaattttacagaaaatagattttctttaaaaattcaaacttttgaaattgatgatttaccttatcaaacttaagaacatgtactttgcatctaaaacattttctaggacaccaatatatactgatcaagtatgagccttacttgatagaatccatagatgggaagagaaccatagatgtactgaactgaaaaggattctggagttaggccatttcagcagaggtggtaaagcgtaatggttaagagtgtaggctttggagcaggatgcctatgttcagattctaacaccaccatgtaccagcttctgatgtggacaaggtatgtaatcgcgctgcacttcagtttcttcatctttaggatggaggttgttgtggggagtagataagttgtgaggcacatggactctggagccagactgcacagctttgaatctagacccctccacctgccctgtaaccttggaaaagtaacttaaactccctgaaccccagttcctttatctaaaaaatgggtttattaataatgcctactttataggattaatggatagattataggttgatatctgtagaatgctttgaacagtactggacatgctcttatttcatgctgttattatttcgattgttgctgttgtcatcaattccatgctgttattatttcgattgttgctgttgtcatcgttaacttagatccctctccaggaaatagtaagcttccaagaagtgttagtcactgttgttacgaacatcatcatctaatccgtgccctcatcttataggtcaggatgcaaaacaaagatttcaaagttgtgacttaaggtccccaggcttttctgtggtctggaaggaagaactagtgtctgacagtagaagagatagcaaagacatattgatggtgatagctctctttcatcaccacaagttttatctcctgtatgttgaggaattttttcctttgggaaaacaccttgaattttataaagaaattccctatgagatgacatttagtcagtgaaatctttgaaagcattagctctcaagcagccctcctaagacacacagactgaagccaggactgcctccactcagaaaaaataacagttccttcactctcctcttggcctgtagaaaatccaagtgagggccagactcagtggctcacgcctgtaatcccagcactttgggaggccgaggcaggtggatcagttgaagccaggagtttgagaccagtctggccagcatgacaaaaccccatgtctactgaaaatacaaaaactagctgggtgtggtggcgcgcacctgtagtcccagctcctcaggagacacaagaatcacttgaaccttgagggcagaggttgcaatgagccgagatcgcgccactgcactccagcctgggtgaaagagcaagactgtctcaaaaacaaaaagaaaaaaagaaattggttctctctctcacatgtctggtgctcagacattcatgttaggtgttttaagttcaataagtagaatttgagcatgatttgataatagttatataactattcagtaaatcacttgaatcaatgtctattgtaatgtgtttaaattgcattgggtgcaatagccatgaagtcttgtatgactgtctcagtcagctcaggctgctattgaaaatatcgtagactggatggcttaaaccagcagtccccaaccttttgggcaccagaaacaggtttcatagaagacaatttttccacaacggggggttgggggagatggctttatgaaactcttctacctcacatcatcaggcatcagattctcatcaggagcgcgcaacctggatccctcccatgcgcagttcacaacagggttcgtgctcctctgagaattccacgccgccgctgatctgacgggaggcggggctcaggctgtgatgcccacttgcctgctctcctctcctgctctgcagcacaggtcctaacaggccgcgggcatgggtcatggccccgacaaacgtttactttttacagttctggaggctgaaagtctgaggtcaggatcccccagcgcggtcaggcgttcggtgagggccctcttcctactttgcagatggctggcttctccctgtgtcttcacagggcggagagagacaggaagcgagctgtctcgtggtgctttttataaaggcacctattctatcatgaggactccaccctcatgacctgataacctccccgaagccatccggataccatcatattggagattagggtttcaacatatgaattttgaggggacacaagcattcagttcatagcaataacgttgctgactcatagaactcagtggtgcaaatcttagcctcagcccaatagggagttccagagcaaagatttcctatgtaagttagtttatccatgccactctctgtccatttactataagttttcttcttttttctttatcctttcttctcctcccccccacctccctttaccctccctcctcttcctccctccttagagtagaatgtaggccccatgaggacagggacttcaatatacttacttacgtattcccatcatctaaataaatgcccaggatatagtaggttctcagtaaatgtatgtgtgtgtgtgtgtgtgtgtgtgtgtatttatttcgttaactagtgaattcacaaaaatccagaaaagtagaagtaaagtttgcattgaaaccaggagcatagaagttggttgtcagctttatcatcagcactgctattactagaaagggaagataagaaagacgaatagaaacaaaaaaattttagagaaatgttgagaatttaaaggaaaatcataatgaagtcctagagtctgcctcctaaaatttgacactgaatataatggagttgaatgtaactctgaaatctttttcatttaccaactgaaaatccttcgggtggaaactttccttccggtaacctgtagttcttagccatcaagaagagcagcctgtgctctttccggacttcaccctttggagcagtttgtgtgaactggtgcttggtccctccagtaaaggatgcacctaccaagggcctaagaagttggtcttggtctaagaacctgccacttactaaaatctggagatggcctgcctgttggatcagccctgtggcatctcagaacaggatttggaccagtatgctagacttttcatttttcattagagatgatgtaaatattaacacaaactttttttttttttttttttgagacggagtcgcccagtctggagtgcagtggctggatctcagctcactgcaagctccgcctcccgggttcacgccattctcctgcctcagcctcccgagtagctgggactacaggcgcccgccacctcgcccggctagtttttttttttatttttttttagtagagacggggtttcaacgggttagccagggtggtctcaatctcctgacctcgtgatccacccgtctcggcctcccaaagtgctgggattacaggcttgagccaccgtgcccgaccaacacaaacttttaagacaagtgttgtagagcaagtgtctccttctcttttggcatttcctttttgtccatcttagcggagttgtcaatgtccttatcagtttgaaacatcctaaaattattctcactgcaatagtgcaacaatggaagctttaaatctctagagaatacatccgtagaagggaggtgttaaattatcttgcagaattaaatggtgcagtgaattgcactattgtcctggtatagagaaaatggtccaaaaaccagtttgggccaatatcaagactgacttgatatcacagacaaggaagaattttatctattttcagaagtggatcagagattttagcaagaaacttctctcctggaaagcttagcacaaagccagtgaaattcaagaagcacgaggatctagctgcagagaaataggagggagaaaatgaatatttattaagcatttactatgggcccagcactttcatatatcttatcgcatacacagctcatagacgttaaataattttccaagattacacagctaacaaatggcagatatttaaatccaggacagactccagaccccctgctctttccattacaccataccgaaagaggagtcttccattttccagtctagttccttggacatagtagacactccgtagaagcgtgttgaattgaattgcattcctaactggggaaataacaaaatggtctttgctggtaagaaatagctgtaggttacccaagacagtccctcactgaaaggaagctaagcggtttctgacttcactgagacatgtgactaaccaggaatctagtgaggaatttggaactgtagaagggagaaaaagtgggtcttggaggttgaataaagtttgggaaagatgaaacaggaaaagaaaagcatttcagataggaactaacttccaggagttccaacctaagaacgagagtgtgacgtgtaggggctggtgaggaaaccagcccaactgaaacagagggtgtctgccctttggttcgttccatggttatcccctacccacacttctgttttaatattgggcaccataattcaaaaagactaactacaaatgtgaggcattcacaagaacagttatgtattgagctttacagaagattaaagtagtaatcagctttctttcgacattgtctgaatcactgtcttctaagttgattgtccctttatctagttctgttgctttcaggtcctggtcagaaggtgggctttggaaccagattacttggtttcaaatttctgtgtacctcactttcttcatttgtaaaatcaggataataatatacccgccccagagggctatttgaggattaaatgaagtaatgtaaatcccttagaacaatgcttttacatgtcagtagttggtcagttaatgttagctattaactggctttaacctgaaggcccaagctgaccacttacagcattaatacccttccggcatttctctttcccctccctcctcactttctctgtcttcctctcagctgtcacttaatgggaggactgaataagagttccttacttttcaactctggattcaaactattcttgcaccacctgaactccagtttaatagtgttccctctatatgctcagaaatgtctttaactggtttattgtttgacctcggcacactacctgtttctgcttttcgggtttctcttcttccctcctccccacaaagaaatttaaaatcctcatttctgcttttcactattttccagagggttcactccctttccaccccatccttctgccctggattctcaccaactgtctcagaactctgcccactgctattacaagccaagctttccaccagccctttttgcataccatactcagcaggtcccttctgtgggcctctgtcttcgctgagcctccatctcttctcatgagcatatactcacacactgaaacacaagaacagttttgctgctgctgctttttttttttgcttttttttttttttccccctggtcccaagcagcttgaacctatgtcaaatcaaaaaagattctgtaggccagacagggtggctcacgcctgtaatcccagcacttaaggaggccgaggcgggcagatcaccctaaggtcaggagttcgagagcagcctggccaacatggcaaaaccctgtctctactaaaaatgtaaaaattagccgggtgtggtggagcgtgcctgtaatcccagccactcggaaggctgaggcaggagaatcacttgaatccgggaggcggaggttgcggtgagccaagattgcgccactgcactccagcctgggcggcagagcaagactccatctcaaaaaaaaaaaaaaaaaaaagattttggaaaagagttatttttgacaaaggcattgggaaataaagactaaatgatcagtgatgctagtagttcccatttaaagaacacctagtaagcgccaaacactgagttgtgagtttataagcacattgtaagcatgttttcgttgaaaccaatgtaacaatcgtaagggataggtaccattttcattattttactgctgaggaaactgaaccgtggagaagttagcttacttacccaagttcacatacccagtacacagtacaagccagatttgaagccagatatgcctaattatatcaaaacttgacccacctctgataaggaaacaaagctagaagatttttaaaagaggttattatgcctttgtgtccatactgattacaagagaaaggagagtaaatgatggaattcaggacatgcttccccaaatatggcgccttagcattggataaaacagaagcaggaagttctctttgaccttctcctcacccttcttgcctgaagcaagtgatgaaagaattttctgacctgcccctaaagtcagtcataaaaccttcattgcagaggcacccaccccatagctggaggaaaagaatgtccttatctctgaagacagaggaacacaaagaacagcaaacaggccttgcccagtttattactattattagattacactctctgtcctcaaatccatttctccatgactgtctactcttcgtcttagtataaaaatacacagatttccttttttgaagtcttcatttctttctttctttttttttttagagacagtgtctctctctgtcgctcagactggagtgtagtggcgtgatcatagcttactgtagcctcggactcaggggctcaagggatcctcttgcctcagactcctgagtagcagggactacaggcgtgtaccaccatgccctgctaaattttgtattttttagtagaagcagggtctcactatgttgcccaggctggtctcaaactcctgggttcaagcagtcctcccacctccgcctcccaaatttctgtgattacaggcctgagccacagagcccggctgagttcttcgtttctgaaggctcccatgttacataaaacttacagtagccgggtgcggtggctcaagcctgtaatcccagcactttgggaggccgagacgggtggatcacgaggtcaggagatcgagaccatcctggctaacacggtgaaaccccgtctctactaaaaatattaaaaaattagccgggcgtggtggtggctcctgtggtcccagctactcgggaggctgaggcaggagaatggcgtgaacccgggaggcggagcttgcagtgagctgagatccggccactgcactccagcctgggctacagagcgagactccatctcaaaaaaaaaaaaaaaaaaaacttacagtaaataaatgtgtatgtttttctcttgccagtgtctgttatagggttctcccccattaacctagcagcagatgaaaaaagaaaatctcttctcccctaagaatattcccataagaatatccaattataaataatgaagactaacaataaactccttttaaaatctgagtagaaagggaccccatggtagcaatgtatgtatgttggactaatttgtaactattctcctaagtgtttaccttagtctttctgataatacattttaggattagtatactacaaatgtactttttctccaaaattataaatcctggatacattcatttatgtagatatgacatacctttcttgcttcaaatatcaataacatgtagtgtaagaagcctccaagggtgtggtctttttaaagctggaactcacatcctttattctatctagtaagccatctctcaggtctcattcttgagaagaaaaaaaaagctgacaataaaattaatttctacatttaaatttatttttcccgtaatgtttcacatcaaaatggaagccatgtttttcatcatttcattcaagacataaaaccttgtgaaaaaccaaagtaatggaggaaatgaggaattgtttaatggatgtagagttttagttttgcaagatgaaaaagttctggagaatggttgcacaacaatgtgaatgtatttagcactcgtaaactgtgcacttcaaatggttaagatggtgaattttatgttatgtgtattttactataattttaaaactttcctaattagaaaagaagtaatgctgattttctggcaaaaaaaaaaaaaaagatgtgttcaaaacatgcactgaatattatttggaaaagttttcttagtgaagagaaaggggcaacttcctctttcccaggtaaacatttcgaggttttgaaatggaaaagaactacccttgaggctttgatttagccttttgttctctgcttgggaactgggctatttgtttgtttatttaactggttgctttattagcgtagtaaagcattacactgtttgttcttccttgatttgaactgcttagaagtctttaataatttgcataatttattatttttaaatatgttcacattcagcatttcctttaacaaagatacacacctataccttttacaaagactgaatatttaggcaacttaacagctacaaactgagctttttaatgaattgaagcacttttcattcaacagagatacaaatttggggaccatcttttagaaattggatccagaaaaatactctgaaccagggactgacttttaaataatttcccaacatcaattaaatgagatttttccttttttttttttttcttttttaacattttttgttttgcttaatgaggttaaacttttttttttcccccctccaagacagagtctcactctgtcacccaggctggagcgcagtggctagatctcggctcactgcaaactccgcctcccgagttcacactgttctcctgcctcagccgcccaagtagctgggactacaggcacctgccaccatgcctggctaatgttttgtatttttagtagagatggggtttcaccgtgttagccaggatggtctcaatctcctgacctcgtgatccgccctcctcggccccacaaagtgctgggattacaggtgtgatccactgcgcccggccgaggttaaacttttaagcaaaaccctacaggaaagttatctggaactctttacaaaatgagtgagtgtatgtctttgtgagaagagcagcgtgtggagtgcacgggtatgcatttattggtttacttccccaagcccagtgtttgtgtttgtttgtttttggtattttagtttttttttttttaattataaagcattatattgttatatttaaatcttttcctccattattattattattttaaaattgacatctaatcattttacatgttcaaggggtacagtgacattttgataaatgtgtataatgtataatgctcaaatcagggtaattagcatatttatcacctcagatatatatcatttctttgtgttgggaacatttaaaattcactcttctagctattgaaaaatacacataacaaattgttgttaattatagtcaccttatagtgctatagaacaccagaacttgttcctcccatctacctgtacttctgctcactcagtggattcttctctcccgctgcacagaaaagccagcacaccgagacagcagcattacagtagagaaagagttcgattatctcaaggccgctgatcagaggacgagagatatttctcaaacctgcctccccaagaattcggaggctagggttttccaggataatttagcaggctgagggctagggaatgggtactgctgattggttggagttgagatcataaaggtgtcagaaactatcttcatacactaagtcagtttctagatgggggtcacaagaccggttgagtcagttccttggtatgaatgacaggtccgagtggagtcagttggttgccaaaatgcaaaagtctgaaaaatatcttaaagaccaatcttaggttttacaacagtgatgttatctgtaggagcagttggggaggttacaaattttgtaacctccagctgcatgactcttgatgagtaagcaattctagaaaagtaagctggggaataggccgggcacggtggctcacgcctgtaatcccaacactttgggaggctgaggtgggtggatcatgaggtcaggagattgagaccatcctggctaacgtgatgaaaccccatctctactaaaaatacaaaaaaatttagctgggtatagtggcgcgtgcctgtaatcccagctacttgggaggctgaggcaggagaattgcttaaaccagggaggcagaggttgtagtgagccgagatcgtgccactgcactccagcctggtgacacggcaagagtccatctcaaaaaaaaaaaaaaaaaaaaaaaacagctagggaacaatggctggttatcatttaactacaccgacatcttagaggaattcagtcttttctcatactcctaaccttgtggcctttcattcgtcttacagagatggtttcagtccccagagggggtcagcttgcagagggactattatcatttttgcttcaaagttaaactataaactaaattcctcccatagttagcttggcctatgcccaggaatgagcaagaggagtgagcttgtgaggttagaagcaagatggagtcagtcaggttagatttctctcacttttataattcttgcaaaagcatttttatattcattaacccacctctggctttccccttccccctacccttcctggcctctaggaatcactcttctactctctgtttctatgagatcaactttttaagcttctgtacataaatgagaacatatggtatttatctctctgtgcctgactttttcacctaacatattgtcctcccagctcatccatgttgctgaaatgacagagtttcattcttttttttttttaatcactaaatagcattccattttatatatatttgccacatttatccattcatctgttgatggatacttaggttagttccatatcttggcagttgtaaatagtgctgcactaaacatgggagtacagttatctctttgatgtactgatttcctttcctttggatatatacccggtggtataatagctagatcgtatgatagttctattctagttttttgaaaaccctccatactgttttctataacggctgttctaatttacattgccaccaacactgtataagagttcccctttctccacatcctctccagcatttgttattttttgttttggggggttttaaaataatagccattttaattggtgtgtgatggtatctcatcatggtttgtacttgcatgatgatttgcgatgctcagcagtttttcatattcctggttcaaacgcagtataattttggttgggaggccattaggctaaggcagctccaatgccctgagttcctatataaacaaactgaaacccaactctttgtaaacagccatattctaggccaatcagaaaccaccaactaaccccctacctcgaggcttcccaatacttaagtttaaccaatcagaaactgcctggctaacctctaaccagggacttggcactggaatgatccagaaaacatcactgccccactttaaccaataagggattttctttaccttgcttctgctttcaccttacaaaagtcttctcccaatctcttcatcagaagaacccccaaccacttatggcctaagactgcctgattaatgaattgcggtctgctcaaataaactctttaaaattttaatgtgcgtttatcttttagcacctgtttaatctcactgtgatcacaaaccatacattgtattgttttaattattttacatttttgagacttttgttttatggcccaaaacatgagcatcttaatgaacatagcttgtgctcttaaaggaatggtattctttgtcacatacagtgttctgtacatatcaattaggtcaggctggttgatagagtttgtcagatcctccatgtcttcactgaatttttgtagaggaagaggtctgttaattgcagagaaagcagcattcagatctccaacaaaaattagagatttttctgctttgaattatttcaggttttactttgtattttgaagctctggctgtgtttgcaaactcatttatgattattatatactcctgataaacctttttattttcagaaatactgtttgtcttgaaatctacgtcacctgtcttaaatcagcaaggggcactagaaagtgacagaaacggcagatgtaaataatgtttaacaagtaataggcattcagtgaatacttgttgaatattgaattttagtattttctgtgtggcagattgccagataatatggtttcgtgtgtgtgtgtgtttcttttttaataatctgttttctgagtctcagagtggatgagatgctatggataaaatagtatgcacttcgggaaattagttagttatttccaaggttgagcgttggtcctagccttctaatacctaacattgaaggaagaagcagctcataatacacaatgaatgagtaggcaatctagcttaaatctttagagaaaaactaattattgcacatacaatgtcaggtgttttcaatagagaggaatagcaggtcaggaaggacagcttcataaatacatgatcttaggacctttggctacatttttactgctttcctgatatttacttgaaccaaagctcattctctatataccaacacaagtacaattctattctgttcttcagctgtttaaaacaaagtggtttcttcatatcatgatttaaaaagagtagttgttcatgtctctgaaaaaaatcattggaaaagaagagtagtttttcttaattctaaagatcctcaaggcagtggtgtcttaagcaggaaaataggagagacccatgcagccttaaggaagctcactgtaatcttccctttttcctcttgtttctttatccctagaagtaaacaaactaaaactggttttgacatttgaaaaggaaataaacattggagtaatcccctgtgattctctttacccagccgtctgctaaaagtgtgtcttgagaagagcttgagagagagagagagagagattagatagattacatagataagatagatagattagatagattggatagatagataggatggatagataagatagattagatagattagatagatagatagatagatagatagatagagataatctgtctctactccacaggtcaataataactcactaacgcatagccagggagatgtcagagtggcttgagacctcaagaagctttttctgaaatccttaaaacctaagaaccttttatttttttctttcttattgttcagttgcctgctaagtttttgtgggaataggagttggactagcatgctactgcttagagaacaggattagaattctttgctgccaagagtatgatttctttaaatttgtgtttctgttgtgtaaagaaagctatctacttcctagaatataaagcacagacataattttagtaggcacttacgctggattgtgcttggtaattggcagtgcaagcactttttagtgtaatggtgtagccacatctcttgtggggataggaatattttcctgttacaatgaatggtgagctcttctgcattctgctttcttccctttccccacagacttgtagactcttgacaaacagagcagagaaacaaactttctgtaccaacattgtcaccagcccagattcctaaatctccgactctactaagacatgccagtcatctgtacctatcagcctttcctcatagcaaggactgggacagaaaaggaattggttacaataatcatcattcccctgggaacaaaggtctcacgcaatcatttctccttggtgtgtttttggcttacagaatgactgtgagacaacgttgatctgtttacgtgacttagagctgttagcacagccttttaatggccaaagttacttttttcctgacagacttagtattaggatcaacttaccatttttctggccctaatgcacagagctcttaaattcctcatgggtcacatatctctgtttttctgcgtaacatgaattatccaagaaaaatgtagacacctacttaatagaaaaagcattgaatcagggtcagagacttcaaagtaatccattaacctcttggtacctcagtttattcatctctgaagtgggcgtgatgataactatcctacttttcttgaggcaccgacgtaatgaatgtgaaagtagtttgtaaatccatgatttgccatacaattaatagctgttgtttactaacctgccggtagccaacatgtacttctgtatagcttttgcatagtatctgaagtctaacacagggagtttttagaacattctttttttttttttttttcgagacggagtttcactcttattgcccaggctggagtgcagtggtgcgatctctgctcactgcagcctccacctcccgggttgaagtgattctcctgcctcagcctcccgagggcatgcaccaccacacccgtctagttttgtatttttagtagagacggggtttcaccatgttggccaggctggtctcgaactcctgacctaaggtgatccacccgcctcaacctcccaaagtgctaggattacaggtgtgagccactgcgcccggcctttagacattctttgcaagtaagttagaggaatgtcaataagagcaggctgtagtcgttggaagataccagatttctggatttttagggttagtctctcttcttaatgttctctagaactcaattacttttggataacttgcagaaattcccagaattctaggatctttgctctagactatacagcttttgccaaatttagtccacaactatattatatgttttgtggactacagtagttcatctaatgtggtatagtaatgcatactatttcagatttgaaagctctgtcaacattatatcaatggaatgctgcttttatttcctaattctaccccagtttttcttaccatgttctgtctttgtacctctaaattcagtgtatcactcttttttcttcataatttagcatggtttgtgactgggccacattccatcttccacttttttcgtaaaaccattttttctccatataagtttcagaaccattgggattccttcagaacagctgtgtctgccctccttctagtggcccactagaacatgtatgtctggagagctgcaatgcctgggaccctataggcaggtttatatacttttttttttttttttttgaaacggagtcttgctatgtcgcccaggctagagtgcagcggcactctctcaactcactgcaacctccacctctggggtttaagcgattctcctccctcagcctcctcagtagctgggattacaggcagccgccaccacgcctggcttttttttttttttttttttttttgtatttttagtggagacagggtttcaccatcgtggccaggttggtcttgaactcctgacctcatgatccacccccctcggcctcccaaagtgctgggattacaggtgtgagccaccgtgcccagccactttattcttaactaggatttctctgataactggacaccagcctggaagtgtctcagacctgctttcacctactctttgtgttcttaaatcccagacagacccttccagaactagatgaccatcaagacaaacacatactcaattccatttgcccattccagaagcagacaagaaaggagtaggtctcaccatatctcctagatttataacgtgtgctctctacctggcagacactacacatactgtgtaaatcactactgggggcctcctttgtgtggaacctgggtgcctcgatacatatcagaacttttacataaggaagttggattggaagagagatttgtagtcaacagtaactacttggaaaatagaaaagaaaaaggatcgcataatcccatcaccccagtgcaatctcagtttatattttggtgtatcacagatcagcattactatttctcttatgtggtggtgtcataattgtgatacatgacaatagtgcaactacaaatttcctatcttcttttttttaagatattgcatcccacctataaaactggcaagatatattttcttttgcttcccctacagggcagttgtattattttgagggccttttaacttggtgataaagagtatgctttgccctaagacctaatctgaatccagtgtggtggctgtgtaactgcccacaagtcacttaacttcttctctacgcatcagattcctcatttgttaaatggcagtcgtaaaacctataccaaaggttatggtgagagttaaatataataatgtagtcagtgcactcagccctttgcctgacatctaggacgtgctcactaaatggcagcgagggtgacactgaggcggaggcctcttaggctgcatgagtgcattgtaagtaatttgggatagaaccttgtacttaatatattttaagacatcatttatagtgtttcatttatagaaccttttgcttaatatgttttaagataccatttataggtagatcctgcatttctgtggtttctgttgtgatttaaggtggcattgtcctgtgactcacttgatttatttcttacactgaaaattatgtagcatttgaagcatctctggaacatatgcactcagatctgtgggttcagatcttaatgatatgaactcattttactaatgaggaagagctgtcttgccctatttgtggtattatttgtgatttagacattcttcctggacaataaaatatctttgtactttgtacaaaataaaactcttcgtgtattactttttcccacacagtcatctataaatgtagggacccaacagggctcaataaatatttattaaatgaaaacattgatgagttttgccctaaagaaaagttacatatatgctatttacagttttatgcagtgtagtagctatttttaatctttcggtttctccctgaaccctaataggttatcctgtaatttgattccattcatgtgtattagtgtcccaggctgatcttagctccagtcaatacctagtgtgctttctagaatgttatatcattaagttcattactcaccaccctcagcctgtgatttgaccttttttaataccagttttggaagacagacctaacacttgcgtattatatcacattttgactttatagagttatgttgtggaggatatgattcaactcacattttatctgaaatattaaacagcagactcgttacagtaggactctacagtactgctttcattaacttgtcctcagctccctgctaatctgttactttctatacacagtctctgtcttcgggattactatctgttttgggttaaaggaatattttcttagacacaaaactgcattatcaaccaaaacaaaagagcttttctccctgatgtgtcttccttcttcttcctgatcctaggacgacgaggctgaagtttccagctggatctggctgggcatttctgggataaattaaatgagcacgcttgattgaggtgtagctggactgtatcactggcttcctattatgctgggagatcaaagcagagcacaaataagaggcttggtctataaaatattcaaaacagatggcttctttttggtgaaaattcaggttttaaggcaaaacgcttattagcaaaacttcatttcttttcattggaagatagtcactactgaacacatatcactgtttcttcctgaatttcaggactagaatctcaaactttttgtaggaggggggatttggcaaacctagaaattaggaattagattgtctgggttttcatgtgaatatgaagttagttattaaaattttgctgttggtattctagaatcaaatgaaagcatcttatatttggtcacgtaatcattttattgttgggtcactattttaaaatccagtattcatattgttatgtcttctgagaactgaaccaggatgtttatctctgatttcatgttttcactgaaaagtgcattctccgcactcctgtatcattgacatctgagtcctcaagttcatgcggagtaattccatgtgatatgaaacttttattattttggtttaaaactgaaatgagaaagaagattaattcaaaaatattttggggacatctaccaatgtgcctaacactgcattaggtacatggtaaaaaatacatgttttaagacattgaaacaaatgctgaatgatggattttttccaacagagaaaaattatgtaagatataatagaaaaacccaggtctccaaagagatttaggggttcacagagaaggtgacacttgagctaactcttcaaggagcaataggcatttgccaggcagatataattttagataaagacatttgcaaagatatagaagcataaacagcataacaaatttagtatattcttggtagctcattatagatcgtagttagggtacatatcagttatctgttgcaacattacacattaccccaaagtctggcacataaaacaacaataaatgatttttatctcaatggtttctgtgtgtcaggaattcagcagcgtcttagctgcgtagttcttacttggggtctctcatgggaccgcagttgtctaaaaccttccctggggatagaacagccagttccaggattgctcacccacagcttgtgctacctgttggaaggaaccttcagttccttgccatatgaaacctctccatcgggctgctggacgtggtgacatggagtccagcttcacccagaatgagtgatccgagagatgagagccagaaggaagccacaatgccttttatgacctgaaatcataagttatacaacatcacttcggccacgttctgttccttagaagtgagtcactaagaccatcccacactgagcagggtattagggcttaggtaccactttttgaaaagatgaatgctaaataattttcaggctttttttttttttttttttttttttggcaatagagtcttgctctgtcgcccaggctggagtgcagtggcttgatctcggctgcctgcaacctccacctcccgggttcaagcgattctcctgcttcagcctcccaagtatctgggattacaggcacccgccaccacgcccagctaatttttttgtatttttagtagagacggggtttcaccatgttggccaggctagtctcaaactcctgacctcaagagattcacctgccttggcctcccaaagtgctgggattacaggcatgagccaccacgcccagcctcagatttgttttttcagttactacgggatgtcagagagggagagacaagccattaggtggctgcagtcagcagcaggtggattgcgaagaccttagcatgccattgcaatctgtagaggatggacaggcggagagggaggtacacggggcagagtactggaaacaggacagccagttcagagcttgctcctttgtcctggagagcgatactgaggggctgaatgggtgcagggatagaagagtttagaagtgagaatatgtttattatcaagaagctctggttcttctaggaaatgacccagttggtttccagtccatcttggtttagaaaatagagaacaccatttgaatgcccagttataattcagaaaggtaactcgcccacaggaactactcaggtaaaagcaatgaaataaagcctgaaagttctctaaccgctccaggggagaaccgcgagctgtgaggaactaatgctgactgagaacttagctcctggtcatctttacagatcaagtcacctctcgggattttgaatttttcatttagaaagttaggcagggggacgggggcagatgtctctaaaattccttccatcttttgtattctgtactcagaatgagtactatgagtacaggatgctgtttggatccaattagtgttttaaacttgtctaaccttgagaacatttgacccaatagaaacatttaacctattcacagatatttagttcaggttgtatcagtgtcaaggaatctttaactgagtgttttctggagctgaaactaagttaacttagtatcttgatcaatttatacacatagttgaaaatgttcagctttttaaattttcttatcctatggaatcattttaattagtatcagttatttttcatatttaagttgtataatgattttatttatcggagtttttttttttttttaaggtatcttacaaatctgtaattataattgaatcttacaaaacaattatcggagtttttacatagattttactaattgtaacttcctataactgtcagttttcattttatgcctgtcgccaaatccagttttccttttagccagcgttttattttgtgttaatattattcatgatacaagtaattttcattgtgaatggatttttttaggtagtaattattattcctttttaaaataatatgttagaaaattataagaatttcctctttagtattgtatttaccctgttgtctgagattggtctcttacggaaattggcaaacattttttaatggtccagatagtaaatagtatatagttacacttttggtttttgtttgtttttgagacagggagtgcagtggtgcaatcacagttcactgtagcctcaacctcctgcccagtctcaagcagtcctcttacctcagcctcctgagtaactgggactattggcatgcaccaccttaccctgctaattttttaaactttttataaagatgagtctctctgttttgcccaggctggtctcgaactcctgagctcaagcagtcctgccacctcgacctcccaaagtgctgggatagcatatacttacgctttgcagactgtatacttcctgccaaaacagttcaactctgctgttgtagtgtgaaagcacccacaggcaacatgtaaatgaatgactgtggctgtgaactactcaattttagacactgaaatctcatgttcatataaaaaccattctgagttgatgggctgtacaaaaacaggcagtgctgaatttggttcatggactgtagtgttgtgatgcttgtctagttcttgttgtgtctctcatcattttacatgccttccctagccatctataatccttggtgaggccacgcacatgtggtggcattaaaacgtcctcagggtgaggttgtcaggtagttaccaagaataacttgtctttacatgtactgtaatcctcacaaggatgggcatgattattcccattttacagatgacaaaacaggttattggaaataatagtagtgaataattattgaagaagtttactgtgtggcaggcacagcgattatgacaaccccattgatacactgttaccaaagcaacttgttccaggtctgctacctcgaatgtcacagacgctggaatcctccagagcccatgcttttcaccgctgtgtcgctctgtgtgtgattctgctctgttgtacagaaccatcaatacagtgcaaagatgtcatagcacataagtgatacacatctgtctctagtgagggtagcctctggtctaaaaaacaaaaaccagaaaaaccttttccaccaccgtctctgaaactgaattacccagtcattaacatgatgttaccagccaaccgcctatatcctcctggctgtacagtgtttgaatggccatagccacaggagccacattgccttccctggtactaaaggatggactactgtgtctgcatgcagtgtggtgctgtgatgccacagcgtctgttgccaaagaaatgtttaggtagatgcaattcttagttaagattataagatacagaggatcacctaaattaatttaattccaggctaattaaaaaatttcatgcgagaagtaactgacatgagagcagataagggcaagcatccaggcaaacagctgtgctttcctgagaggtacaagttgtaattgctccaagagatggcaggggtaggagtcgtagttcagaggagcctggctccagccagtcagacatttcgtagctatatgcacgtgtatgttttaaacagcatgttaacctgatgctttattctggtgtacagaaatacatgatcatggagacagaatgtgttaatgaaatcaggggagctgaaaaccttcacgtacgtagaatgtacagcactgaactcacaggtagtcggaggcatacacacccgccttagaatgactttgcagtattcctcaaaatgctgcatcggggaaatgatgtgtggatggtttgctagctagaggatggtttattaattagaaatgtatctgaccaatagcatgagatcttactgcttaaatgaacaagatggcagagactttactccctctgaatgctccaacaaaggcgttctgtttcctgtcagcagtagcatctcatgcaagaagactacagttgctgaagcccacaaggcaactgagtatggagaatttctcaaaattgtatgttgtgtgtatttgggcagactgcttaaagcatggagagcgctgttcctgccgttaaagtaggaattgctgtgtctgtgctatcaaaagtctactccccaaggctgaggctgcagtgagctgtgatcacaccactgtgatcacaccgtgtatatatatatatatatatatatggatactgcctggtaggagaaccagggaaaagcagctacaaacaagagcagattaacatggtgcagaaaaagcatgttctgcttgctcttatcccttttctttgcttgatttctagagttagattttatcatttcactctttattctgtttcctattttctaaacacccataatatattagattatctgattatatcaaaaacgtggtctccatcctctggatttcctcactaaaattggttgtggcttcctttgtgcagtagctttttttatgatactaaaaggtggcacgggtatgagagtctgggagattaaaaaatagatacatgaagattctatacaagcttaactttttcctttttctttttgactatcaagtcactttacagctaaactaggagcctgcttactctcttttgactcacgtagttacctgtgcttcagtctagatgtgtataccacgtaccccttggaacctccttctgtggcctgcctgcaccccgttttttcacttcctggtactctgctgttcccccatgagcatcagtcagttctgtcaaatgctggggtttgttccttctgcccatttcacttcccactttccagtggggctgccccactttgccactgcccttcagaattgatctccagtccctgcttaataatcctgtgtttggagtagagggcaacagagcacatgggtccttcttccagagacgggtgatataaatgcccaaagggtcatctgactggagatccttaggctaattctggtccaggttgtttaatcttgaactctcctggctgttcacttaaaacatcagccaccatttgtagtatctctggtatttgccatgccgagcctcttttgtcatagtcagttgtatatcttcaaataataaagctttgcttaagcatccacaactattaatattgaagtggtgatgaccatcagagtttgtgttgtgctatgcagtttaacgttttgagagagagagaataattcagtgaccacgtgggaggttttattctcaaatagaggaagttggtagagaaagccgtctttctcatgtttgtttttcccaaatctttttttctacccaaagcctggattcctctcaaggtgaaaggggtgatgtctggaaatcgttaatccatgggatctgttcatggtatataaaattttcagaaagaatttgccttttaaagatgatttcctgattgactatagcagatatgaatccaggaagtacaactctgtcagagcagccaaggtccttattagcttctcagatgtatgagattttttagtgcatgtgtggagtggagtaaagattcttcccgtgggcaggtcagaaggagagaggggaggtaggagaagaaaggaagagaatggtagtatacagaaacaaaccaaagctgctggagttgggggaggcaggtgtgtacccatggctttcctggaattagcagctgtccccctgaaaaaccagctttgttttagtttatagttctgagaggaagaagctagggagacacccttagtgccttctgtcctggaactgttttcattcttgaagtgctcttttttaatagtaagaaacatttcctcatcctcttggtgatacaaagttcttgggccactattttcagagaaaactaagctgaaaatattggctgagggccattttgctcagatctctcctcccatctggactttgtgcccctatgcattcttaaacaccaaatcacaaccatttctcacctgttaaagtgagaagcagttttctggctgtttccaatgttagcattaacagatcagatttcttttttttttttttttttttttttttttttgagacgagtctcgctgtctcccaggctggagtgcagtagcgcaatctcggcttattgcaagctccgcctcccgggttcacgccattctcctgcctcagcctccctagtagctgggaccacaggcacccgccagcacgcctggctaattttttgtatttttagtagagatggggtttctgtgtgttagccaggatggtcttaatctcctgacctcgtgatccgccggccttggcctcccaaagtgctgggattacaggcgtgagccaccgcgcccggcccagatcagatatctgtatgtgacttgcctttctccaatggagaggtgcccatttctggtatttacacacagctacagatacatttatagtttcccttggatttcaggtgatagctaactcttcttccctgccacctgtgccctcttagaccatgttcttattaggcactctaataagaagccacgtctaccacaggctccagacacgtaatgagaccctcagtggctatagcctatctgtgggcactcggcaggagacttatatctgcatagtctgttgtgtttggtttgacactagagttcaaataataaggtgactaatggcaaactgtctgcctgctccctcaacccttccatgcacaggcagatggacatacacacacatgccgtcttaacctgaccttgaaataactacctctcacagaagagcctttgtacagataagccatcaaatctcatagtgactagaccgtcatcctcggctcttttgtgtggtcttgcggactgaggaggagcccgtaatgtgttcctcatcatttcagttcacgtctttgttatgttgttccttgttgattgagagctgtcgaggtcaggagtccctctcgtttgccctggataactccacttgcttttcccctccactcccaatgccgtaggagagaaaggagaaaataaaatatgattatgaggttgttacactgttttgccccgtaggcaaccaacgtattgctgtttttcagatccgtctgtctagcagacgtgtgataatgccagaacgtgctgttgtgcttgactgtagcagttacagcagggcacgtgaggcaccaggccccagagggcaggatagagtgtgagttaccagtttcaatgtttacacgttcacacaggcatgcagggagttaaaagccaccatttttccctgtgaccaaccgcctaactagcttttcctttgaaatccagcgtcagtccttgttggactggcctgctcaaaaactatgactctcttctccctcttttgcctcatgtttcttccacattcctagatttttgtccctaatgtctcattcataaatctgtagccctgaaactgtaatgtacagtagggaagccattcagagatgtgtgtgtatatatatatatatatatatatatatgcacttatatttaactcttccatttttcactaaaacacaataagtgatttgttgtggggagccaggcctcaagccgagaactgaattgaaaatgttttctcatctttgttaactcttaacagcaagaaggaattttggaacacatttctgcacctggaatttctgagtgcagcagtaagtggctttctgagtggcattcttgacttgattctggttatctcattgacttttagcagccgtcctttcagggtgcatcctgcatgtacccttgattggttggcttgtaataatagcttctgtgcctcccagtagcattcttttcacttttcaccccatttctatgtgctgtcctcatctgtatatacatgttagcccacctggtgatgaatgacctggttttaatgtgtcttacaagtttccaagtactaaagcaagtacagagaagcctacagtcttgacgtccgttgtagcacatgaagagattcgtagatatactcagccagagatgtccttccgtcactagtaggcaaacccctaacagtctgttccctatgcacatcccttagatttcttttgagtagcattttttataatgcgtaaggcaaaagagattttaactgaatgaagattgaataggcagaatgcggttagcagcgctatagttgagatttcaagatttattttattctgaacactgttccacgtctccttacagctttgaggacataatgttttctcttcatacccgagtccagaaataaaggatgttttgttgtgttttgtttgctagagtggtaatgcatccttaaagaaaaattggcaacagatttgtgagttgtaaaactaagaagaaatgatcatttgttttttccaaaagtgattttcacgtttctttgcatttcaaaacctatagtcttttgtggctttcataggcacacttacactttgacagaccataaaaccctttaaatctgaaacctggcggggcgcggtggctcaagcctgtaatcccagcactttgggaagccgagacggacggatcacgaggtcaggagatcgagaccatcctggctaacatggtgaaatcctgtctctactaaaaaatacaaaaaactggccgggcaaggtggtgggcgcctgtagtcccagttacttgggaggctgaggcaggagaatggcgtaaacccgggaggcagagcttgcagtgagctgagatctggccactgcactccagcctgggcgacagagcgagactccatctcaaaaaaaaaaaaaaaaaaaaaaaaaatctgaaacctttggatagagtttctacttttagaaccagatatttctattagtagtgagatttctgattaacattcattcatctcagtgacctagtggtccctggacctgaactcaatagtaactgcattatatgattttgtgaactctattctttcacaaaatagctgtgtttaaataagaacataacacattgctccagacctttgtgacgaggcttgacatactatccttcgtttttctgaccctgaagtacgttattgactaagaagatatcttagttattgagggtaaagactttgaggcagaattaatgaatttgattttcttgcatcttttacttttcagagtttagctctcagctggggcctcaggataagaatgccattcgaagatgataatttttatggaaagttaatctgttattctgggattttcttaatgtagtctgtgttgagagacagcagtgcagtgatagtccaacaagaaatcaaaactaccactagcatttatgcagttcatatatggacagttgaacctgcctctgaaggcttcagcaggtaaaaagaacagaaagattttgtagccacttcagggctctgagctaaccacagaagaatcatagtagatataaaaataatttgccaggaagacagcaagtgatcaataatgttagctttttaaaaatggggtctttcgggctggatgcagtggctcatgcctataatcctagcattttgcgtgggaatctgaggcaggagggtcacatgagcccaggagttaaagattagccgaagcaatattgtgagaccctttctctacaataaattttaaaattagccaggtatggtggtgcatgtgtctagtcccagctactttgagggctaagataggagaattgctgagcccaggtggctgaggcgtcagtgagctgtgattgcaccactgcactccagtttgggtgacaaggcaagaccttgtctcaattaaaaaaaaattattataaaaaatgacatctttcaaaggacaaaatattagtaccccacgagaaaataccttaagccccaaataacattcagtagctattcgtctagtctttatgaggaggctaggtgagttcttagagtaactctctggcacagaaacagtcgagtgggaagagaaaaacctattggacagaagtttcactctgcacatttcatctagatattgaagtcacgtggctcaagaaagtgtgtttagatctcgtagataaatgagttgcagaaacggaatgctgtagaatcttctgttactatttgtattgaatgatacaggaactgcttaactgtcttcctaaagaccattagttatctaacctcacttaagtggaaactgggttaaaataaacacctttggaagatcactggtcttgtcactatgccatcaaatgctggcctctgaaacctgtttgagaatctactatgtaaacaataaattattataagacgaaacaaagctcttagtacttaaccaaaaatgtctcatccctttttataatttaaattttctcaacaattatgtaaatgtagcattggggccatcatgacattttggcatcatatttggtacaagcaaataattgtgacaagttcacttgttaactttttttcctagtgcagaaaagtgtatttaactgtagttcagcataactggacaaccagtttgtcccgaccacatatctgatggtttttagtaggactccttgccaatgtgttgaggtcgtatgcggaagaaagttacaacttacgggaaatgtccctcttccctcttgagattaggcagtggcagttccaccttgtgggaagcacggtttcttttctgagcgtactgctcaaattagatagggagaaaaaggaagagataagggcatttcccctgtgattgacatggtccatgtgttccgagaggcttaagtagtttttttctggatagatttggggactctgctagctgggcagtttcgtatgctttcacaaagtaagctctatagttgtgtttttaagacatttccctttgacaggggaagaaagaatagacactctagtcattgcatagagtggggtttgttttgttttggagtaaaggtttgtatttttattgatatatttgtacatattttggaagtatatgtggtattttgatacctctatacaacgtaaatgatcaaatcagagtaatccatcacctcagcctttattttttctttgtaaaatgagtttttatcttggataaacaatttagaatttcattctttttaaaattttctttctttttctttcttttttttttttttttttgagatggagtctcgctctgtcgccagactggagtgcagtggcgcgatctcggctcactgcaagctctgcctcctgggttcaagcaattctcctgtctcagcctctcaagtagctgggactacaggcatccaccaccaagcccggtttttttttttttgttttttttttttttgtatttttagtagagacgggatttcctcttgttagccaggatgctcttgatctcctgaccttgtgatccaccctcctcagcctcccaaagtgctgggattacaggtgtgagccactgcacacagccttttttttttttttttttttttttttaatagagacagagtcttgctatgttgcccaggctggtctcaaactcctggccttaagcgatccccctgcctcagacttactttttttttgtttttttgtgatggagtctcactctgttgcccaggctagagtgcagtggtgtgatctcagctcactgcaacctctgcctcccaggttcaagcaattctcatacctcagcatactgagtagctaagactacaagtgtgtgccaccacacccagctacttttcatatttttagtagagacaaggtttcaccatgttggccagactgctgtcgaactcctgacctcaagtgatccacccaccttggcctcccaaagtgctggaattacaggcatgagccaccacacctggcctcaaccttattttttaagttttcgattggactctgaaattttttggaataccaaatgccatcatgtttatttaatcaattagccttcaccataaaatgcatttaaatcaatttgaaaaaaaatttttttttgagacagagtctcgctgcaacgcccagcctggagtgcaatgttgcaatctcggctcactgcaacctccccttttcaggttcaagcgattctcctgcctcagcctcccttgtagctgggactacaggcgcccgccaccacgcccggctaattttttaaatatttttagtagagacggggtttcactgtgttagccaggatggtctcgatctcctgaccttgtgatctgctgcacccggcctttttttttttttttccaatagaggcagaatcttgctatgttgcccaggctggtctcaaactcctggccttatgcgatcctgctgcctcagactttttttttgtttgtttttttggtgatggagtctcattctgttgcccaggctggagtgcagtggtgtgatctcagctcactgcaacctctgcctcccaggttcaagcaattctcatacctcagcgtactgagtagctgagactacaggtgcatgccaccacacccagctacttttcgtatttttagtagagacaagatttcaccatgttggccagactgctgtcgaactcctgacctcaagtgatccacccaccttggcctcccaaagtgctggaattacaggcatgagccaccacacctggcctcagccttattttttaagttttcgattggactctgaaatttttcagaataccaaatgccatcatgtttatttaatcaattagccttcagtataaaatgcatttaaatcaatttgaaaaaaatttttttttcttttgaaacaaagtctcactacaatgcccagcctggagtacaatggcacaatctcggctcactgcaacctccccttttcaggttcaagcaattctcctgccccagcctcccgagtagcgggaattacaggcgcctgccaccatgcctggctgatttctgtatttttttagtaaagatgggttttcaccatattggccaggctggtctcgaactgctgacgtcaagtgatctgcccgctttggcctcccagagtgctgggattacaggcgtgagccaccgtgcccagctgaaatttattttttattaagaataaggacctaagaagtcagcatccacagtcatagtggtagcaggagtgagctaataatatcttttcaaattctgttttactataaggaatttgaccttctccatatgaccatttatcacattgtcccctttcttcatggtcatacttttttctaccagtttgtcaatcaaaagtaattacctaagataatcagctctttcggcctttgcagcgcagatgtggcatttgtgatggtagctgtgtgcacacaaacatgcgcgtgtgcactaagagaatgggaataaattgcacaaacccaatgaaaatcccaaaagtgatttttttaaatcaatgtatctgtgaaagtagagaaaaccaagcttttaaaaaatgggggattaaatagggccacgttacttggcgtcatgggggatgtagtaatagaaccgtgatcagacagtttcatcattggtgcacaaagtgtatttgcatttaaagtaattttaccttcaaagattgcacttggaattctttttaaactttccacaataagtacccttttttttttttttttttttttttgagacagagtcttactctgtcgcccaggctggagtgcagtggtgcgatctctgctcactgcagcctccgcctcccaggttcaagctgttctccagcctcagcctcccaaatagctgggattacaggcacctgccaccacgcccagctaatttttgtatttttagtagagacaaggtttcaccatgttggccagactgctgtcgaaatcctgacctcaagtcatctgcccgccttggcctcccaaagtgctgggtttccaggcatgctccaccacgcccaaccacaagtatacgtgtatgcccagaaataaaatacaatatttttgaaaggttggtattgtttgcaaaaaactgtccaactcccccactctaaattctctacttgattgaaacatcgtcttccttctgtgactggctgtgttgtcgggccttctaggtgggaaattccagcacagaactggtaccataaacctgctgatgaggagtctcatggagcccgggagccttccacagcagcactttggtgtttatcgtttatccttagagtgagagagagaactttaaaaacaaaagtaatgctaaattgattaattttctctggtttgtctagccaggctccagcttatgtgttatatactgtataggcctaaactgaactctgatctttttagtaagctaaagcactaaatccttgctctttattctcttttaattatttcctggaaatagtattagaaacaaaggaaatgtgctatatttattatgcagccattaaaaacctattttcactgaaaataggtttatatatatacacatatgtaggtttttatatatacatatataatgtagtgaacagtactcacaatataatgttaaatagataaacaatgtatcaagcaaaatgtgaggtatgatattgttagaagctgatttatataaatgtattaaaagacttggcaggaaaagtaccaaaatgttacaaatgattacttctgttttttttttttttttttttgagacggaggagtctcgctctgtcgcctaggctggagtgcggtggcacgatctcagctcactgcaagctccgcctcccgggttcacgccattctcctgcctcagcctcccaagtagctgagaccacaggcgcccgctgccacacccagctaattttttgtgtttttagtagagacgggatttcaccgtgttagccaggatggtctcaatctcctgaccttgtgatccgccctcctcggcctcccaaagtgctgggattacaggcgtgagccaccgtgtccggccacatgattacttcttggtggaagtgtatgcaattgtcttatttcctttatatttttctttttttccccacattttttggagtaaagtgtatattgtttttataataaaaacattaaactttatttgcttaaaaaacttgtttaaaaagaaaggaagggaggtggcaggagcagtcctctgagggggtccgaggagggatcagtgttactgtggaaagtaataccaggccctgcttctgttgacttgatcattgagctcccaattcattagttaggccagaggtgtcctgttcatgaaagttgccaggctggtgacatgcagcaggtgcagacctctgctgtgtgagccctgggagcacactgagaactgccagcatttcggcagtgctcacagcgctcacagctgctgcgtgtcgggcaggtgctgctgtaatgcttgtgttctgtgatgtgagatctggccccactctcctcctgaacactccaggcttggaccaactaccaactacctggccagactattgtcacgagagccgtcagatgaaatcctggggcaggagtcgccgtcatttagtgtgcttccagaaggaatcaaaggagtcgctgctcaagcaggggagagaaatgagaaaagaaaaaacgtagagcgagtctgttacttaaaaacaacacagaaccaatgttacaaccaagaattgtagagtccttggctgtgagtcaggtgcttggtgttacataaggatttatcaatcactgtttcagaagaatatcggataacctctgtgaaatgaattgaggggagcataagccaggatgaggcagaatttgtaatgagttccctcatcacatctcttggccaagaaaaacatgcactttctccagagacagaatttttcttccattccaggaggcggaggaacacttgatgtatatgtagtccaggctttcagatgagcagctttcactagcagttttttgtaatctactcagaaataagtgaagagagaaagtgtgaggtaactggagtctttctgtatcaggaatagcctctctgtaaaaacgagttagtcctgtgcttaatccctgcctcagtacagagctattcatctggtgtggatatattaagccagcattctcttcatgtctcccagaagggcggctgggtgtgacagcgtaaatgtgtgacaatatgtgaaaatgtttctgtaatcctgaagatttcagtagtgattagaagagcgttagtctttggtcaattttctttgacttgggaggcgtaaagaatatttgaacctctcatttcagaccttgactttcctctttttttttttttttttttttttttttttgcctcagatcatccagcccctcttagaacttgaccaaaatagaagtaaattaaagttgtacattggacacctgacagccctctgccatgaccgagaccccctgatcctccgtggactcactccaccagcttcctataacttggacgatgaccaggcggcttgggagaatgagctgcagaagatgacccggggacaggtgagcttctcactcacacattgaaaagagcctgtgaaaatccagttgctgtgtaggttgatgcagtgggagctaccttggggaattccatgtttagattcaagattttggggtggggaggggtttccagataccattttttaactgatttttaattgattttttactgtttttttttttttaattcacaaattaaaaatgtatattttccatgtacaacatgagacttgacttggattgcttgatactttggttttggttttgacctggcttggatttctggatactctgattttggttttgattttggtttggtgtaaactacaaaagtgtgtatgtgccctttttacccgttccttttgtggtgtgtgtgtggtgtgagcgtggtgttttgtctagaggaaacatgggtgaggcacaaagtaagcccaccggtctaggaactgtgttgaaaattttcaaaaaaaggatttaggggagactatggagtactatgacaccaggaaaacttaaaactttgtgtaaggccgggcgcggtggctcaagcctgtaatcccagcactttgggaggccgagacgggcgaatcacgagttcaggagatcgagaccatcctggctaacacggtgaaaccccgtctctactaaaatacaaaaaaaaaaaaattagccgggcgaggtgnnnnnnnnnnnnnnnnnnnnnnnnnnnnnnnnnnnnnnnnnnnnnnnnnnnnnnnnnnnnnnnnnnnnnnnnnnnnnnnnnnnnnnnnnnnnnnnnnnnnnnnnnnnnnnnnnnnnnnnnnnnnnnnnnnnnnnnnnnnnnnnnnnnnnnnnnnnnnnnnnnnnnnnnnnnnnnnnnnnnnnnnnnnnnnnnnnnnnnnnnnnnnnnnnnnnnnnnnnnnnnnnnnnnnnnnnnnnnnnnnnnnnnnnnnnnnnnnnnnnnnnnnnnnnnnnnnnnnnnnnnnnnnnnnnnnnnnnnnnnnnnnnnnnnnnnnnnnnnnnnnnnnnnnnnnnnnnnnnnnnnnnnnnnnnnnnnnnnnnnnnnnnnnnnnnnnnnnnnnnnnnnnnnnnnnnnnnnnnnnnnnnnnnnnnnnnnnnnnnnnnnnnnnnnnnnnnnnnnnnnnnnnnnnnnnnnnnnnnnnnnnnnnnnnnnnnnnnnnnnnnnnnnnnnnnnnnnnnnnnnnnnnnnnnnnnnnnnnnnnnnnnnnnnnnnnnnnnnnnnnnnnnnnnnnnnnnnnnnnnnnnnnnnnnnnnnnnnnnnnnnnnnnnnnnnnnnnnnnnnnnnnnnnnnnnnnnnnnnnnnnnnnnnnnnnnnnnnnnnnnnnnnnnnnnnnnnnnnnnnnnnnnnnnnnnnnnnnnnnnnnnnnnnnnnnnnnnnnnnnnnnnnnnnnnnnnnnnnnnnnnnnnnnnnnnnnnnnnnnnnnnnnnnnnnnnnnnnnnnnnnnnnnnnnnnnnnnnnnnnnnnnnnnnnnnnnnnnnnnnnnnnnnnnnnnnnnnnnnnnnnnnnnnnnnnnnnnnnnnnnnnnnnnnnnnnnnnnnnnnnnnnnnnnnnnnnnnnnnnnnnnnnnnnnnnnnnnnnnnnnnnnnnnnnnnnnnnnnnnnnnnnnnnnnnnnnnnnnnnnnnnnnnnnnnnnnnnnnnnnnnnnnnnnnnnnnnnnnnnnnnnnnnnnnnnnnnnnnnnnnnnnnnnnnnnnnnnnnnnnnnnnnnnnnnnnnnnnnnnnnnnnnnnnnnnnnnnnnnnnnnnnnnnnnnnnnnnnnnnnnnnnnnnnnnnnnnnnnnnnnnnnnnnnnnnnnnnnnnnnnnnnnnnnnnnnnnnnnnnnnnnnnnnnnnnnnnnnnnnnnnnnnnnnnnnnnnnnnnnnnnnnnnnnnnnnnnnnnnnnnnnnnnnnnnnnnnnnnnnnnnnnnnnnnnnnnnnnnnnnnnnnnnnnnnnnnnnnnnnnnnnnnnnnnnnnnnnnnnnnnnnnnnnnnnnnnnnnnnnnnnnnnnnnnnnnnnnnnnnnnnnnnnnnnnnnnnnnnnnnnnnnnnnnnnnnnnnnnnnnnnnnnnnnnnnnnnnnnnnnnnnnnnnnnnnnnnnnnnnnnnnnnnnnnnnnnnnnnnnnnnnnnnnnnnnnnnnnnnnnnnnnnnnnnnnnnnnnnnnnnnnnnnnnnnnnnnnnnnnnnnnnnnnnnnnnnnnnnnnnnnnnnnnnnnnnnnnnnnnnnnnnnnnnnnnnnnnnnnnnnnnnnnnnnnnnnnnnnnnnnnnnnnnnnnnnnnnnnnnnnnnnnnnnnnnnnnnnnnnnnnnnnnnnnnnnnnnnnnnnnnnnnnnnnnnnnnnnnnnnnnnnnnnnnnnnnnnnnnnnnnnnnnnnnnnnnnnnnnnnnnnnnnnnnnnnnnnnnnnnnnnnnnnnnnnnnnnnnnnnnnnnnnnnnnnnnnnnnnnnnnnnnnnnnnnnnnnnnnnnnnnnnnnnnnnnnnnnnnnnnnnnnnnnnnnnnnnnnnnnnnnnnnnnnnnnnnnnnnnnnnnnnnnnnnnnnnnnnnnnnnnnnnnnnnnnnnnnnnnnnnnnnnnnnnnnnnnnnnnnnnnnnnnnnnnnnnnnnnnnnnnnnnnnnnnnnnnnnnnnnnnnnnnnnnnnnnnnnnnnnnnnnnnnnnnnnnnnnnnnnnnnnnnnnnnnnnnnnnnnnnnnnnnnnnnnnnnnnnnnnnnnnnnnnnnnnnnnnnnnnnnnnnnnnnnnnnnnnnnnnnnnnnnnnnnnnnnnnnnnnnnnnnnnnnnnnnnnnnnnnnnnnnnnnnnnnnnnnnnnnnnnnnnnnnnnnnnnnnnnnnnnnnnnnnnnnnnnnnnnnnnnnnnnnnnnnnnnnnnnnnnnnnnnnnnnnnnnnnnnnnnnnnnnnnnnnnnnnnnnnnnnnnnnnnnnnnnnnnnnnnnnnnnnnnnnnnnnnnnnnnnnnnnnnnnnnnnnnnnnnnnnnnnnnnnnnnnnnnnnnnnnnnnnnnnnnnnnnnnnnnnnnnnnnnnnnnnnnnnnnnnnnnnnnnnnnnnnnnnnnnnnnnnnnnnnnnnnnnnnnnnnnnnnnnnnnnnnnnnnnnnnnnnnnnnnnnnnnnnnnnnnnnnnnnnnnnnnnnnnnnnnnnnnnnnnnnnnnnnnnnnnnnnnnnnnnnnnnnnnnnnnnnnnnnnnnnnnnnnnnnnnnnnnnnnnnnnnnnnnnnnnnnnnnnnnnnnnnnnnnnnnnnnnnnnnnnnnnnnnnnnnnnnnnnnnnnnnnnnnnnnnnnnnnnnnnnnnnnnnnnnnnnnnnnnnnnnnnnnnnnnnnnnnnnnnnnnnnnnnnnnnnnnnnnnnnnnnnnnnnnnnnnnnnnnnnnnnnnnnnnnnnnnnnnnnnnnnnnnnnnnnnnnnnnnnnnnnnnnnnnnnnnnnnnnnnnnnnnnnnnnnnnnnnnnnnnnnnnnnnnnnnnnnnnnnnnnnnnnnnnnnnnnnnnnnnnnnnnnnnnnnnnnnnnnnnnnnnnnnnnnnnnnnnnnnnnnnnnnnnnnnnnnnnnnnnnnnnnnnnnnnnnnnnnnnnnnnnnnnnnnnnnnnnnnnnnnnnnnnnnnnnnnnnnnnnnnnnnnnnnnnnnnnnnnnnnngggaggctgaggcaggagaatggcgtgaacccgggaggcggggcttgcagtgagctgagatccggccactgcgcactccagcctgggcaacagagccagactccgtctcaaaaaaaaaaaaaactttgtgtaagatagactggccagcattagaggtaggttggccattagaaggaaacatggacaggtcccttgtttcaaaggtatggcacaaggtaacatgtaagccagggaacacaaaccagcttgttttagatcccccacccccaacacatggtggttgagagaacagcagcataagcggctggcagaggcaaggaaagaccagcagagagagagaaagcaaagagacagagagaaaaagaggcagagagagagaaagagacagaggcaaaaggaaagtcaaagagagagagacaaagtcaaagagagaaagaaagagagagatatacaagtggttaagaaaaaaaaaaatgtaccctgttcctttaaaagccatcataccaattttaatttggacaaaacaaggtcttattaatagcaaagaataattaaaatcccaaacttacaaggttttcaacaaaagcaaaatttgctaaaagttaacagtgtgacatgtattatagtaacttctnnnnnnnnnnnnnnnnnnnnnnnnnnnnnnnnnnnnnnnnnnnnnnnnnnnnnnnnnnnnnnnnnnnnnnnnnnnnnnnnnnnnnnnnnnnnnnnnnnnnnnnnnnnnnnnnnnnnnnnnnnnnnnnnnnnnnnnnnnnnnnnnnnnnnnnnnnnnnnnnnnnnnnnnnnnnnnnnnnnnnnnatgtattatagtaacttctaatcttgtggccttagacagtctagtccacagacataaaaaaaaaaaaaaaaaccagattcgctttggaaaagaatggttatcatcttcagaaaaaaagaaaaaaaagagggggcagaatttatataaaaagagtgttacatggtaaattcttgtcctgaaataaattaactggttgtttaaagaaagaaatgtttgtaataagtcagaaagttaaggcatgtcaaaaaattgcctgtaaaagtcgtggaaaaaaaaaaggttataaaaaatgtgtgttaaaaaaagaattttaggcaaaaaatgttgtataatttaaaagtaactaggcctcctgaatgtaaaactattggaaaaaaaaataaaaaacagtttatgtgcaaggtgtataagaaaagcaaaatatacctttggtaaaaggattatgaggaggcataagaatgtacatttttacctacattaaaaagttaaaaattattgttttgaaggtttaagcaagttttaaaatgttaatcgtaaagaacattctgtgtgtaaacatattagctaaagttaaagaagtatccagtttttctgtgaactggacattaaagtaaaagcataataggtttttcttaaagcaacaacctgctctttagcaaaaattataaaagattaaaaagattctataaaatcttcccttatggtcagacattaaaattaaataaatatgtctacaaggtttattaaaattaggtttaactttaataacacactaatataaagataaaatgtagcttatctggtataaaaatcatacaagaagcattgttaaatgtaaaatggtatttggctgtctttggcttaaaaactaatactaataaaaataggtgctaagggaaatttctcagtaaaaaggcagtaaggactataaagtccactgcaaaggtccccacatttaaaacaaaaagtcaacttcttaaaaattataaacttggttttcttaaaaattataaacttggtttatcttccactttcctttctcacaaaacaaacaaatgaaaagtcttttagcacatgtactgcccctagaatttccagtaaaccaacaccagcctgaagatcacattctcatcgaaaggtggaaagaagaaaatctccagccagctggggaaggcccctaccttgtgctgccaaccaccgagactgctgtttgtgcagcaaaaaaaggagagactcatcacacccgagttgagaaagcgccaccccctccagagtcgtgggccacagtcccaggggaaaaccctgccaaactaaagcgaagaaaaatttaactcttttaatctactctattactcttccttctttccgtgttctattgctggccatctagttattaatataaccaagtcaatttcgcctcaaactattgcatttaatgcttgccttgttataccctgtgaagacttgccaagtcaaagacagctttctacttcagaaaagtacctctgtccctcctgactctcctcagactgggaattagtaaactaggaccatttaatctggggagatttcgataaagaccccagtgcaaaccaggagtcttgccccccgatgtagagctttcatgccatagttggtccaacgtactatggaccactaaagagcaaggatggactgccccaactggttttgtaatttccctaaaaccatacattcattttaccagaggatcatagaagttaaagacttaaactgtagcaattaagacaggataccaagatgcaaatgcctggttaaaatggatcaaatattccatctgcacattaaacaaaagcaattgttatgcttgtacacatggcaggccagaggcccagactatcccccttacactaaggtggtcctccagtcgaccaggcgtaggctgcatgatagctcttttccaggattctatagcctggagtaataagtcgtgccaagttctctctgctatatcccagagtccctgcgggtcagcctctgagggccatccagcttccatctcccaacactaagttgacttcgtgtctctcaccacagggaggaaacttcgcattccttggagacttgaaaggatgcaatgagcttaagaattttcaagagcttatcaatcagtcagcccttgttcatccctgagcggatgtgtggtggtgttggggtggacctttactgggcactctgctgaataactggagtggcacttgtactttagtgcaatcggctctcaatcggctctccctttcaccctggcatttcatcaaccagaaggggaaaaaaaaataagacatcataaagcgagagaagccccttatgggtcttttgactctcatgtctatttagacgcaattggagtcccacgaggaataccagatcaatttaaagcttgaaatcaaatagctacaggatttgagtcagtattttagtaggtgacggttaataaaaatgtagattacataaactacatctattacaaccaacatcaacgagcttttcatgaattaaaagaaaaactcatgtcggccccagccctggggctacctgacctgacaaaactcttcactctatgtgtcagaaagagaaaaaatggcggttggagttttaacccagactgtggggcctggccaaggccagtggcctgtctctcaaaacaactagacaagtttccaaaggtcggccgccaggtctaagggccctagcagcaatggccctgttagcacaagaagcagataaactaacccttaggcaaaacctgaatataaacaccccccatgctgtgataactttaataaataccaaaggacatcattggttaacaaatgcttcattaaccaagtaccaaagcttgctatgtgaagatccccacataaccattgaagcttgcaaaaccttaaaccccaaaccccaccaccttgctcccagtatcagagagcccagttgaacataactgtgtagaggtgttggactcagtttattctagcaggcccaacctctgagaccatccttaaacatcagtagactgcgagcggtatgtggatgggagcagctttgccaacccctgcaaagtgactctgaagaagacaagcctgctccagtcacacccggaagctgactggtccacgcacggccaaatcatgagaaaactcatcgcgggactcattttccttaaaatttggacttgtacagtaaggacttcaactgaccttcctcagactgagggctattcccagtgtatacatcaagtcactgaggtaggacaaaaggttgctaaggtcctattattttacagttatgagtgtactggaactctaaaaagaacttgtttgtataatgttattctatacaaggtacgtagctcaggaaatgaccaacttgatgtgtgttatgacccatctgagcctcccatgaccacagttcttaagattaaggactaaggattggtgggagctcataaatgatatgagtaaagtgttagccaaaacagagggaaaaaaaagggggtgcccaaacaagtcaccttaaaatttgtgctgtcattactagtaatgttaggaataaggtgtggttctcttaattagaagagaggctatatggcagnnnnnnnnnnnnnnnnnnnnnnnnnnnnnnnnnnnnnnnnnnnnnnnnnnnnnnnnnnnnnnnnnnnnnnnnnnnnnnnnnnnnnnnnnnnnnnnnnnnnnnnnnnnnnnnnnnnnnnnnnnnnnnnnnnnnnnnnnnnnnnnnnnnnnnnnnnnnnnnnnnnnnnnnnnnnnnnnnnnnnnnnnnnnnnnnnnnnnnnnnnnnnnnnnnnnnnnnnnnnnnnnnnnnnnnnnnnnnnnnnnnnnnnnnnnnnnnnnnnnnnnnnnnnnnnnnnnnnnnnnnnnnnnnnnnnnnnnnnnnnnnnnnnnnnnnnnnnnnnnnnnnnnnnnnnnnnnnnnnnnnnnnnnnnnnnnnnnnnnnnnnnnnnnnnnnnnnnnnnnnnnnnnnnnnnnnnnnnnnnnnnnnnnnnnnnnnnnnnnnnnnnnnnnnnnnnnnnnnnnnnnnnnnnnnnnnnnnnnnnnnnnnnnnnnnnnnnnnnnnnnnnnnnnnnnnnnnnnnnnnnnnnnnnnnnnnnnnnnnnnnnnnnaaaaaaaatcaccctaataatttctgggtcctaaaagcctcaactattggacaatattgcatagctagagaaggaaaagaattcactcaccccgtaggacgacttagttgtctgggacagaaactgtataatggtaccacaaaaaaacagtcacttggtggagttcaaatcaaacagagaggaatccatttagcaaattcccaaagttgcaaaaccatgtggacccagccagagtcccaccgggactggacagcccccactggattatacttggtatgtgggcatagagcttacgccaaattacctgaccagtgggcaggtcgttgtgttattggcactattaaaccatctttcttcctactgcccataaaaacaggcagactcctgggcttccctgtctatgcttcccgtgaaaagagaagcatggctataagaaattgaaaaaatgataaatggccccgagagaatcatacaatattgtaagcctgctacttaggcacaagatggctcgtggggatactggacccccatttacatgatcaactgaatcatacagttacaagctgtcttagaaataatcactaatataagcggcagagccttgactattctgttctggcaagaaactctgatgagaaatgctatctatcaaaatagattggctctcgactacttgctaacaattgaaggagagatctgcaggaaatttaaccttactaattgctgcctacacatagataatcaagggcaagtagttgaagacatagttagagatgtgacaaaactggcacatgtacccatgcaagtgtggcatggatttgatcctgaggccatgtttggaaaatggttcccagcgctaggaggatttaaaactcttataataggagttataataataataggaacctgcctactgcttccttgcttgatacctgtacttcttcgaatgataaaaagcttctttgctaccttagttcaccaaaatgcctcagcacaaatgtactatataaatcagtatcgatctgtcttgcaagacatgggtagtaaaaataaaagtgagaattcccactaataaaatgagtgagagcctcaaaaggggggaatcagggaggagaccacccctcatattgtcttatgcctaatttctgcctccaaagaaagaaaaagtaaaaactaaaaggcagaaatgaaatccgcaggcagacagcccagagccacacgctgggcctcgtagttaacgatcaaccccaacctaatcggttctgttatctatagattccagacattgtatagaagagctctgtgaaaatccctgtcctgttctgttccgttctgattaccggtgcatgcagcccccagtcacgtaccccctgcttgctcaatcaatcatgaccctctcacatgcacgcccttagagttgtgagcccttaaaagggacaggaattgattgctcacccatggagctcggctcttgagacaggagtcttgccgatgcctgcggccgaataaaccccttccttctttaactccatgtctgaggagttttgtctgccgctcgtcctgctgcataactagttatccgtcatttatttgatgtgtaaagataaggcctacttctcaaatttagcatgttgccataggaattttaatctttttctttcttgaaagaggaaaaaaattgaaaggacagtattaaattcgtcaaggagctgtggctcacacctgtagtcccagctactgctactcaggaggctgaggcgggaggattgcttgagcccaggagttcaaggctgcagagagctatgattgtgccactgtactcagcctgggtggtgacaaagtgagaccctgtctctaaagcgaaaaagaaaaaaaaggacagtattaaattaaattcctaatagctctttttgatattgatagccatatagtaaaaatgtaatggaaataaataaatatatgcataattacagtgcaaccaaaaacccattggaaacagggcacatggctattcattttagagacttttgcttcagaattttgcaaaaattcggtgcttcttaaaagcagtgctgctgggcacagtggctcacatctgtatcccggcttttgggaggctgaggcaggagaatcccttgagcccaggagttcaaaaccagcctgggcagtgacatagtgtcacatgcctgtagtcccagctgctcaggtagttaaggtgggaggatggcctgagcccaggcagtcatggctgcaatgagctgagatcgtgccaccgtactccagcctaagtggcagagcaagacctcatctcaaaaacaacagcaacaaaaaaaaaacccagtgcttattaatgtattaaagtttaactggcattaaattattcctttgtaaaacagtttgttttgtttttgtttttgttttggagacagagtctcgctgtgtcacccaggctggggtgcagtggcgcgatcttggctcactgcaacctccacctctcaggttcaagcaattcgtgtgcctcagcctcccgaatagctggaactacaggcgcgcaccaccgtgcccagctaattttttgttttttagtagaaatggggtttcaccaggttgcccagactggtctcgaactcctgagcccaggcagactgcctgcctcaacctcccaaagtgctaggattacaggaatgagtgaccgtgcctggccagcttgtctttgaaatggaaaagatcatttttgctcagtcctgtattttcaatatgcctggatggacttaactcaatgttaccaaggcaaaaaaaaatcttcagggtgataccaagatagaaaatttcaaactaaggatttttcaacaagttttgagtgaatgaaacctgattaatagacttcccattgcagattgtgttatagtcaagctatgcactcatcaaaacaattgtgctcatacacatgaattgtgttaatattgtcatgtttccctttaattgagagtgtacttcggttactgaagttactgtttgaggtgtgtgaaattgtattctccccaatagtccctgggaaacgggagacctgggtcatctacagaggagtacaataactaacaatccctactataagcttcttcatagcttctaaagattggtggagaaaccaacccatttcctgcttcctcaccccaagtaagaatttaaggaagtaatgtaggctgtctaacaatataaaatgacttgcctgggaaagtattgtgatcagagtttgacttcagctgtgaaggccaagaaacagaagatgtgagtcactgccagatatgcatattgctttattttgtgtgtgtgttttgtttatagttttgtagttttgtttttgtgatgcagagccttctgctcctgacatttgcagtttccgcctcgtatctgcagcacatttcactgccaccatgctcccaccaacaccacccccatgaggacggggcaagaactttgtctatctttttcagtgctagggcagtgcagaagggaagtaaatgtaggatcagagcccctacacagtccccactggggcactgcctagtggagctctgagaagaaggccaccgtcctccagactgcagaacagtagatccaccgctggttcgcagcgtgcactgggaaaagccgtaggcactcagtgtcagcccatgaaagcagctgggagggggctgtgccctgcggagccacaggggcagagctgcccacggccctgagagcccacctcttgcatcagcgtgacctagatgtgagacatggagttaaaggagatgattttggaactttaaggtttaatgactgccctactgggtttcagacttgcctggcgcctgcagcctcttcattttggccagtttctcccatttggaataggtgtatttacccaatgcctataccctcattgtatctaggaagtaactaacttgatttagattttacaggctcataggcagaagggacttgcctcgcctcagatgagactttggacttggacttttggattaatgctggaataagctaagactttgggggactgttggaaaggcatgattgtgttttgaaatgtgaggacatgagatttgggaggggccagggatagaattatatggtttggctgtgtccccacccaaatctcatcttaaattgtagttcccataatccccacgtcatgggagggacccagtgggaggtaattgaaccatggaggttgttaccccccatgctgttctcatgatgaatctcgtgacttctcatgagatttgatggctttataaggggcttttccccctttgcccggcacttctgtctcctgccaccatgattgcaagtttcctgaggcctccccagccatgcagaagtgtgagtcaattaaacctctctcctttgtaaattacccagtctaaggtatttcttcatagcagcgtgagaacgggctaatacactatgtctttatatttaaggtgggtttcttgtagagaacatatatcaaatcagtaattgtcttctgattgaagtgtttagaatatttgcacctgatagcctgtcatctttatatttatctgtttcatctatttttttcctctgtttctgttttcttttaaagtaattttttaaatttattttatttccactagtagcttaaagctcaactccccaccccctttaagtgattgctccgccccctttaagtgattgctccgtggtttacagtgtacagttttagcttatcatagtcaaattgtgaaaatataatataccacttcaggtatagtataggaatctgccaatagtatacttctatttcctttgtctcaaacttgatgcttttgttggtatatattttattcctccatatattataaactccatagtgcattgttactgtctttgctttaatcagttatttttttgattgttttattgtggtaaaatgtacacaacataaatattaccatcttaacattttctacgtgtacagttcagggttgtattcataatgtaaactatcaccaccatctatctctgtagctcttttcatcttgcagaactgaaactctatacctgttaaacaataactccccattttcccttgccccactattccatctgctgtctgattttactactctaaggatttcatataaatggagtcatgcagatttgtctctttgtgactgacttatttcattgagcaaggttcatctgtgtcgtaccttgtttgggaaaattcttatgtcagaatttccttcctttttaaggctcttgttttatataccacattttccttactcattcctccatcgatggacacttgggctgcttccacattttagctatcttgaataatgctgccatgaacatgggtgtataagtatcttttcgagaccttgctttccgttcttttgatatcaaatcaaaagaagagaaattgctggaccatgtggtaaatcctattttcaattttttgaggaaccaccatactgttttccacagcggctgtaccaatttacactcccgccagcggcacacagggttccagtttctccgtatcctggccagcactggttactttgtagtctttggtatgttttttaaatagtagccgtcctcatgggtgtaaggtggcatnnnnnnnnnnnnnnnnnnnnnnnnnnnnnnnnnnnnnnnnnnnnnnnnnnnnnnnnnnnnnnnnnnnnnnnnnnnnnnnnnnnnnnnnnnnnnnnnnnnnnnnnnnnnnnnnnnnnnnnnnnnnnnnnnnnnnnnnnnnnnnnnnnnnnnnnnnnnnnnnnnnnnnnnnnnnnnnnnnnnnnnnnnnnnnnnnnnnnnnnnnnnnnnnnnnnnnnnnnnnnnnnnnnnnnnnnnnnnnnnnnnnnnnnnnnnnnnnnnnnnnnnnnnnnnnnnnnnnnnnnnnnnnnnnnnnnnnnnnnnnnnnnnnnnnnnnnnnnnnnnnnnnnnnnnnnnnnnnnnnnnnnnnnnnnnnnnnnnnnnnnnnnnnnnnnnnnnnnnnnnnnnnnnnnnnnnnnnnnnnnnnnnnnnnnnnnnnnnnnnnnnnnnnnnnnnnnnnnnnnnnnnnnnnnnnnnnnnnnnnnnnnnnnnnnnnnnnnnnnnnnnnnnnnnnnnnnnnnnnnnnnnnnnnnnnnnnnnnnnnnnnnnnnnnnnnnnnnnnnnnnnnnnnnnnnnnnnnnnnnnnnnnnnnnnnnnnnnnnnnnnnnnnnnnnnnnnnnnnnnnnnnnnnnnnnnnnnnnnnnnnnnnnnnnnnnnnnnnnnnnnnnnnnnnnnnnnnnnnnnnnnnnnnnnnnnnnnnnnnnnnnnnnnnnnnnnnnnnnnnnnnnnnnnnnnnnnnnnnnnnnnnnnnnnnnnnnnnnnnnnnnnnnnnnnnnnnnnnnnnnnnnnnnnnnnnnnnnnnnnnnnnnnnnnnnnnnnnnnnnnnnnnnnnnnnnnnnnnnnnnnnnnnnnnnnnnnnnnnnnnnnnnnnnnnnnnnnnnnnnnnnnnnnnnnnnnnnnnnnnnnnnnnnnnnnnnnnnnnnnnnnnnnnnnnnnnnnnnnnnnnnnnnnnnnnnnnnnnnnnnnnnnnnnnnnnnnnnnnnnnnnnnnnnnnnnnnnnnnnnnnnnnnnnnnnnnnnnnnnnnnnnnnnnnnnnnnnnnnnnnnnnnnnnnnnnnnnnnnnnnnnnnnnnnnnnnnnnnnnnnnnnnnnnnnnnnnnnnnnnnnnnnnnnnnnnnnnnnnnnnnnnnnnnnnnnnnnnnnnnnnnnnnnnnnnnnnnnnnnnnnnnnnnnnnnnnnnnnnnnnnnnnnnnnnnnnnnnnnnnnnnnnnnnnnnnnnnnnnnnnnnnnnnnnnnnnnnnnnnnnnnnnnnnnnnnnnnnnnnnnnnnnnnnnnnnnnnnnnnnnnnnnnnnnnnnnnnnnnnnnnnnnnnnnnnnnnnnnnnnnnnnnnnnnnnnnnnnnnnnnnnnnnnnnnnnnnnnnnnnnnnnnnnnnnnnnnnnnnnnnnnnnnnnnnnnnnnnnnnnnnnnnnnnnnnnnnnnnnnnnnnnnnnnnnnnnnnnnnnnnnnnnnnnnnnnnnnnnnnnnnnnnnnnnnnnnnnnnnnnnnnnnnnnnnnnnnnnnnnnnnnnnnnnnnnnnnnnnnnnnnnnnnnnnnnnnnnnnnnnnnnnnnnnnnnnnnnnnnnnnnnnnnnnnnnnnnnnnnnnnnnnnnnnnnnnnnnnnnnnnnnnnnnnnnnnnnnnnnnnnnnnnnnnnnnnnnnnnnnnnnnnnnnnnnnnnnnnnnnnnnnnnnnnnnnnnnnnnnnnnnnnnnnnnnnnnnnnnnnnnnnnnnnnnnnnnnnnnnnnnnnnnnnnnnnnnnnnnnnnnnnnnnnnnnnnnnnnnnnnnnnnnnnnnnnnnnnnnnnnnnnnnnnnnnnnnnnnnnnnnnnnnnnnnnnnnnnnnnnnnnnnnnnnnnnnnnnnnnnnnnnnnnnnnnnnnnnnnnnnnnnnnnnnnnnnnnnnnnnnnnnnnnnnnnnnnnnnnnnnnnnnnnnnnnnnnnnnnnnnnnnnnnnnnnnnnnnnnnnnnnnnnnnnnnnnnnnnnnnnnnnnnnnnnnnnnnnnnnnnnnnnnnnnnnnnnnnnnnnnnnnnnnnnnnnnnnnnnnnnnnnnnnnnnnnnnnnnnnnnnnnnnnnnnnnnnnnnnnnnnnnnnnnnnnnnnnnnnnnnnnnnnnnnnnnnnnnnnnnnnnnnnnnnnnnnnnnnnnnnnnnnnnnnnnnnnnnnnnnnnnnnnnnnnnnnnnnnnnnnnnnnnnnnnnnnnnnnnnnnnnnnnnnnnnnnnnnnnnnnnnnnnnnnnnnnnnnnnnnnnnnnnnnnnnnnnnnnnnnnnnnnnnnnnnnnnnnnnnnnnnnnnnnnnnnnnnnnnnnnnnnnnnnnnnnnnnnnnnnnnnnnnnnnnnnnnnnnnnnnnnnnnnnnnnnnnnnnnnnnnnnnnnnnnnnnnnnnnnnnnnnnnnnnnnnnnnnnnnnnnnnnnnnnnnnnnnnnnnnnnnnnnnnnnnnnnnnnnnnnnnnnnnnnnnnnnnnnnnnnnnnnnnnnnnnnnnnnnnnnnnnnnnnnnnnnnnnnnnnnnnnnnnnnnnnnnnnnnnnnnnnnnnnnnnnnnnnnnnnnnnnnnnnnnnnnnnnnnnnnnnnnnnnnnnnnnnnnnnnnnnnnnnnnnnnnnnnnnnnnnnnnnnnnnnnnnnnnnnnnnnnnnnnnnnnnnnnnnnnnnnnnnnnnnnnnnnnnnnnnnnnnnnnnnnnnnnnnnnnnnnnnnnnnnnnnnnnnnnnnnnnnnnnnnnnnnnnnnnnnnnnnnnnnnnnnnnnnnnnnnnnnnnnnnnnnnnnnnnnnnnnnnnnnnnnnnnnnnnnnnnnnnnnnnnnnnnnnnnnnnnnnnnnnnnnnnnnnnnnnnnnnnnnnnnnnnnnnnnnnnnnnnnnnnnnnnnnnnnnnnnnnnnnnnnnnnnnnnnnnnnnnnnnnnnnnnnnnnnnnnnnnnnnnnnnnnnnnnnnnnnnnnnnnnnnnnnnnnnnnnnnnnnnnnnnnnnnnnnnnnnnnnnnnnnnnnnnnnnnnnnnnnnnnnnnnnnnnnnnnnnnnnnnnnnnnnnnnnnnnnnnnnnnnnnnnnnnnnnnnnnnnnnnnnnnnnnnnnnnnnnnnnnnnnnnnnnnnnnnnnnnnnnnnnnnnnnnnnnnnnnnnnnnnnnnnnnnnnnnnnnnnnnnnnnnnnnnnnnnnnnnnnnnnnnnnnnnnnnnnnnnnnnnnnnnnnnnnnnnnnnnnnnnnnnnnnnnnnnnnnnnnnnnnnnnnnnnnnnnnnnnnnnnnnnnnnnnnnnnnnnnnnnnnnnnnnnnnnnnnnnnnnnnnnnnnnnnnnnnnnnnnnnnnnnnnnnnnnnnnnnnnnnnnnnnnnnnnnnnnnnnnnnnnnnnnnnnnnnnnnnnnnnnnnnnnnnnnnnnnnnnnnnnnnnnnnnnnnnnnnnnnnnnnnnnnnnnnnnnnnnnnnnnnnnnnnnnnnnnnnnnnnnnnnnnnnnnnnnnnnnnnnnnnnnnnnnnnnnnnnnnnnnnnnnnnnnnnnnnnnnnnnnnnnnnnnnnnnnnnnnnnnnnnnnnnnnnnnnnnnnnnnnnnnnnnnnnnnnnnnnnnnnnnnnnnnnnnnnnnnnnnnnnnnnnnnnnnnnnnnnnnnnnnnnnnnnnnnnnnnnnnnnnnnnnnnnnnnnnnnnnnnnnnnnnnnnnnnnnnnnnnnnnnnnnnnnnnnnnnnnnnnnnnnnnnnnnnnnnnnnnnnnnnnnnnnnnnnnnnnnnnnnnnnnnnnnnnnnnnnnnnnnnnnnnnnnnnnnnnnnnnnnnnnnnnnnnnnnnnnnnnnnnnnnnnnnnnnnnnnnnnnnnnnnnnnnnnnnnnnnnnnnnnnnnnnnnnnnnnnnnnnnnnnnnnnnnnnnnnnnnnnnnnnnnnnnnnnnnnnnnnnnnnnnnnnnnnnnnnnnnnnnnnnnnnnnnnnnnnnnnnnnnnnnnnnnnnnnnnnnnnnnnnnnnnnnnnnnnnnnnnnnnnnnnnnnnnnnnnnnnnnnnnnnnnnnnnnnnnnnnnnnnnnnnnnnnnnnnnnnnnnnnnnnnnnnnnnnnnnnnnnnnnnnnnnnnnnnnnnnnnnnnnnnnnnnnnnnnnnnnnnnnnnnnnnnnnnnnnnnnnnnnnnnnnnnnnnnnnnnnnnnnnnnnnnnnnnnnnnnnnnnnnnnnnnnnnnnnnnnnnnnnnnnnnnnnnnnnnnnnnnnnnnnnnnnnnnnnnnnnnnnnnnnnnnnnnnnnnnnnnnnnnnnnnnnnnnnnnnnnnnnnnnnnnnnnnnnnnnnnnnnnnnnnnnnnnnnnnnnnnnnnnnnnnnnnnnnnnnnnnnnnnnnnnnnnnnnnnnnnnnnnnnnnnnnnnnnnnnnnnnnnnnnnnnnnnnnnnnnnnnnnnnnnnnnnnnnnnnnnnnnnnnnnnnnnnnnnnnnnnnnnnnnnnnnnnnnnnnnnnnnnnnnnnnnnnnnnnnnnnnnnnnnnnnnnnnnnnnnnnnnnnnnnnnnnnnnnnnnnnnnnnnnnnnnnnnnnnnnnnnnnnnnnnnnnnnnnnnnnnnnnnnnnnnnnnnnnnnnnnnnnnnnnnnnnnnnnnnnnnnnnnnnnnnnnnnnnnnnnnnnnnnnnnnnnnnnnnnnnnnnnnnnnnnnnnnnnnnnnnnnnnnnnnnnnnnnnnnnnnnnnnnnnnnnnnnnnnnnnnnnnnnnnnnnnnnnnnnnnnnnnnnnnnnnnnnnnnnnnnnnnnnnnnnnnnnnnnnnnnnnnnnnnnnnnnnnnnnnnnnnnnnnnnnnnnnnnnnnnnnnnnnnnnnnnnnnnnnnnnnnnnnnnnnnnnnnnnnnnnnnnnnnnnnnnnnnnnnnnnnnnnnnnnnnnnnnnnnnnnnnnnnnnnnnnnnnnnnnnnnnnnnnnnnnnnnnnnnnnnnnnnnnnnnnnnnnnnnnnnnnnnnnnnnnnnnnnnnnnnnnnnnnnnnnnnnnnnnnnnnnnnnnnnnnnnnnnnnnnnnnnnnnnnnnnnnnnnnnnnnnnnnnnnnnnnnnnnnnnnnnnnnnnnnnnnnnnnnnnnnnnnnnnnnnnnnnnnnnnnnnnnnnnnnnnnnnnnnnnnnnnnnnnnnnnnnnnnnnnnnnnnnnnnnnnnnnnnnnnnnnnnnnnnnnnnnnnnnnnnnnnnnnnnnnnnnnnnnnnnnnnnnnnnnnnnnnnnnnnnnnnnnnnnnnnnnnnnnnnnnnnnnnnnnnnnnnnnnnnnnnnnnnnnnnnnnnnnnnnnnnnnnnnnnnnnnnnnnnnnnnnnnnnnnnnnnnnnnnnnnnnnnnnnnnnnnnnnnnnnnnnnnnnnnnnnnnnnnnnnnnnnnnnnnnnnnnnnnnnnnnnnnnnnnnnnnnnnnnnnnnnnnnnnnnnnnnnnnnnnnnnnnnnnnnnnnnnnnnnnnnnnnnnnnnnnnnnnnnnnnnnnnnnnnnnnnnnnnnnnnnnnnnnnnnnnnnnnnnnnnnnnnnnnnnnnnnnnnnnnnnnnnnnnnnnnnnnnnnnnnnnnnnnnnnnnnnnnnnnnnnnnnnnnnnnnnnnnnnnnnnnnnnnnnnnnnnnnnnnnnnnnnnnnnnnnnnnnnnnnnnnnnnnnnnnnnnnnnnnnnnnnnnnnnnnnnnnnnnnnnnnnnnnnnnnnnnnnnnnnnnnnnnnnnnnnnnnnnnnnnnnnnnnnnnnnnnnnnnnnnnnnnnnnnnnnnnnnnnnnnnnnnnnnnnnnnnnnnnnnnnnnnnnnnnnnnnnnnnnnnnnnnnnnnnnnnnnnnnnnnnnnnnnnnnnnnnnnnnnnnnnnnnnnnnnnnnnnnnnnnnnnnnnnnnnnnnnnnnnnnnnnnnnnnnnnnnnnnnnnnnnnnnnnnnnnnnnnnnnnnnnnnnnnnnnnnnnnnnnnnnnnnnnnnnnnnnnnnnnnnnnnnnnnnnnnnnnnnnnnnnnnnnnnnnnnnnnnnnnnnnnnnnnnnnnnnnnnnnnnnnnnnnnnnnnnnnnnnnnnnnnnnnnnnnnnnnnnnnnnnnnnnnnnnnnnnnnnnnnnnnnnnnnnnnnnnnnnnnnnnnnnnnnnnnnnnnnnnnnnnnnnnnnnnnnnnnnnnnnnnnnnnnnnnnnnnnnnnnnnnnnnnnnnnnnnnnnnnnnnnnnnnnnnnnnnnnnnnnnnnnnnnnnnnnnnnnnnnnnnnnnnnnnnnnnnnnnnnnnnnnnnnnnnnnnnnnnnnnnnnnnnnnnnnnnnnnnnnnnnnnnnnnnnnnnnnnnnnnnnnnnnnnnnnnnnnnnnnnnnnnnnnnnnnnnnnnnnnnnnnnnnnnnnnnnnnnnnnnnnnnnnnnnnnnnnnnnnnnnnnnnnnnnnnnnnnnnnnnnnnnnnnnnnnnnnnnnnnnnnnnnnnnnnnnnnnnnnnnnnnnnnnnnnnnnnnnnnnnnnnnnnnnnnnnnnnnnnnnnnnnnnnnnnnnnnnnnnnnnnnnnnnnnnnnnnnnnnnnnnnnnnnnnnnnnnnnnnnnnnnnnnnnnnnnnnnnnnnnnnnnnnnnnnnnnnnnnnnnnnnnnnnnnnnnnnnnnnnnnnnnnnnnnnnnnnnnnnnnnnnnnnnnnnnnnnnnnnnnnnnnnnnnnnnnnnnnnnnnnnnnnnnnnnnnnnnnnnnnnnnnnnnnnnnnnnnnnnnnnnnnnnnnnnnnnnnnnnnnnnnnnnnnnnnnnnnnnnnnnnnnnnnnnnnnnnnnnnnnnnnnnnnnnnnnnnnnnnnnnnnnnnnnnnnnnnnnnnnnnnnnnnnnnnnnnnnnnnnnnnnnnnnnnnnnnnnnnnnnnnnnnnnnnnnnnnnnnnnnnnnnnnnnnnnnnnnnnnnnnnnnnnnnnnnnnnnnnnnnnnnnnnnnnnnnnnnnnnnnnnnnnnnnnnnnnnnnnnnnnnnnnnnnnnnnnnnnnnnnnnnnnnnnnnnnnnnnnnnnnnnnnnnnnnnnnnnnnnnnnnnnnnnnnnnnnnnnnnnnnnnnnnnnnnnnnnnnnnnnnnnnnnnnnnnnnnnnnnnnnnnnnnnnnnnnnnnnnnnnnnnnnnnnnnnnnnnnnnnnnnnnnnnnnnnnnnnnnnnnnnnnnnnnnnnnnnnnnnnnnnnnnnnnnnnnnnnnnnnnnnnnnnnnnnnnnnnnnnnnnnnnnnnnnnnnnnnnnnnnnnnnnnnnnnnnnnnnnnnnnnnnnnnnnnnnnnnnnnnnnnnnnnnnnnnnnnnnnnnnnnnnnnnnnnnnnnnnnnnnnnnnnnnnnnnnnnnnnnnnnnnnnnnnnnnnnnnnnnnnnnnnnnnnnnnnnnnnnnnnnnnnnnnnnnnnnnnnnnnnnnnnnnnnnnnnnnnnnnnnnnnnnnnnnnnnnnnnnnnnnnnnnnnnnnnnnnnnnnnnnnnnnnnnnnnnnnnnnnnnnnnnnnnnnnnnnnnnnnnnnnnnnnnnnnnnnnnnnnnnnnnnnnnnnnnnnnnnnnnnnnnnnnnnnnnnnnnnnnnnnnnnnnnnnnnnnnnnnnnnnnnnnnnnnnnnnnnnnnnnnnnnnnnnnnnnnnnnnnnnnnnnnnnnnnnnnnnnnnnnnnnnnnnnnnnnnnnnnnnnnnnnnnnnnnnnnnnnnnnnnnnnnnnnnnnnnnnnnnnnnnnnnnnnnnnnnnnnnnnnnnnnnnnnnnnnnnnnnnnnnnnnnnnnnnnnnnnnnnnnnnnnnnnnnnnnnnnnnnnnnnnnnnnnnnnnnnnnnnnnnnnnnnnnnnnnnnnnnnnnnnnnnnnnnnnnnnnnnnnnnnnnnnnnnnnnnnnnnnnnnnnnnnnnnnnnnnnnnnnnnnnnnnnnnnnnnnnnnnnnnnnnnnnnnnnnnnnnnnnnnnnnnnnnnnnnnnnnnnnnnnnnnnnnnnnnnnnnnnnnnnnnnnnnnnnnnnnnnnnnnnnnnnnnnnnnnnnnnnnnnnnnnnnnnnnnnnnnnnnnnnnnnnnnnnnnnnnnnnnnnnnnnnnnnnnnnnnnnnnnnnnnnnnnnnnnnnnnnnnnnnnnnnnnnnnnnnnnnnnnnnnnnnnnnnnnnnnnnnnnnnnnnnnnnnnnnnnnnnnnnnnnnnnnnnnnnnnnnnnnnnnnnnnnnnnnnnnnnnnnnnnnnnnnnnnnnnnnnnnnnnnnnnnnnnnnnnnnnnnnnnnnnnnnnnnnnnnnnnnnnnnnnnnnnnnnnnnnnnnnnnnnnnnnnnnnnnnnnnnnnnnnnnnnnnnnnnnnnnnnnnnnnnnnnnnnnnnnnnnnnnnnnnnnnnnnnnnnnnnnnnnnnnnnnnnnnnnnnnnnnnnnnnnnnnnnnnnnnnnnnnnnnnnnnnnnnnnnnnnnnnnnnnnnnnnnnnnnnnnnnnnnnnnnnnnnnnnnnnnnnnnnnnnnnnnnnnnnnnnnnnnnnnnnnnnnnnnnnnnnnnnnnnnnnnnnnnnnnnnnnnnnnnnnnnnnnnnnnnnnnnnnnnnnnnnnnnnnnnnnnnnnnnnnnnnnnnnnnnnnnnnnnnnnnnnnnnnnnnnnnnnnnnnnnnnnnnnnnnnnnnnnnnnnnnnnnnnnnnnnnnnnnnnnnnnnnnnnnnnnnnnnnnnnnnnnnnnnnnnnnnnnnnnnnnnnnnnnnnnnnnnnnnnnnnnnnnnnnnnnnnnnnnnnnnnnnnnnnnnnnnnnnnnnnnnnnnnnnnnnnnnnnnnnnnnnnnnnnnnnnnnnnnnnnnnnnnnnnnnnnnnnnnnnnnnnnnnnnnnnnnnnnnnnnnnnnnnnnnnnnnnnnnnnnnnnnnnnnnnnnnnnnnnnnnnnnnnnnnnnnnnnnnnnnnnnnnnnnnnnnnnnnnnnnnnnnnnnnnnnnnnnnnnnnnnnnnnnnnnnnnnnnnnnnnnnnnnnnnnnnnnnnnnnnnnnnnnnnnnnnnnnnnnnnnnnnnnnnnnnnnnnnnnnnnnnnnnnnnnnnnnnnnnnnnnnnnnnnnnnnnnnnnnnnnnnnnnnnnnnnnnnnnnnnnnnnnnnnnnnnnnnnnnnnnnnnnnnnnnnnnnnnnnnnnnnnnnnnnnnnnnnnnnnnnnnnnnnnnnnnnnnnnnnnnnnnnnnnnnnnnnnnnnnnnnnnnnnnnnnnnnnnnnnnnnnnnnnnnnnnnnnnnnnnnnnnnnnnnnnnnnnnnnnnnnnnnnnnnnnnnnnnnnnnnnnnnnnnnnnnnnnnnnnnnnnnnnnnnnnnnnnnnnnnnnnnnnnnnnnnnnnnnnnnnnnnnnnnnnnnnnnnnnnnnnnnnnnnnnnnnnnnnnnnnnnnnnnnnnnnnnnnnnnnnnnnnnnnnnnnnnnnnnnnnnnnnnnnnnnnnnnnnnnnnnnnnnnnnnnnnnnnnnnnnnnnnnnnnnnnnnnnnnnnnnnnnnnnnnnnnnnnnnnnnnnnnnnnnnnnnnnnnnnnnnnnnnnnnnnnnnnnnnnnnnnnnnnnnnnnnnnnnnnnnnnnnnnnnnnnnnnnnnnnnnnnnnnnnnnnnnnnnnnnnnnnnnnnnnnnnnnnnnnnnnnnnnnnnnnnnnnnnnnnnnnnnnnnnnnnnnnnnnnnnnnnnnnnnnnnnnnnnnnnnnnnnnnnnnnnnnnnnnnnnnnnnnnnnnnnnnnnnnnnnnnnnnnnnnnnnnnnnnnnnnnnnnnnnnnnnnnnnnnnnnnnnnnnnnnnnnnnnnnnnnnnnnnnnnnnnnnnnnnnnnnnnnnnnnnnnnnnnnnnnnnnnnnnnnnnnnnnnnnnnnnnnnnnnnnnnnnnnnnnnnnnnnnnnnnnnnnnnnnnnnnnnnnnnnnnnnnnnnnnnnnnnnnnnnnnnnnnnnnnnnnnnnnnnnnnnnnnnnnnnnnnnnnnnnnnnnnnnnnnnnnnnnnnnnnnnnnnnnnnnnnnnnnnnnnnnnnnnnnnnnnnnnnnnnnnnnnnnnnnnnnnnnnnnnnnnnnnnnnnnnnnnnnnnnnnnnnnnnnnnnnnnnnnnnnnnnnnnnnnnnnnnnnnnnnnnnnnnnnnnnnnnnnnnnnnnnnnnnnnnnnnnnnnnnnnnnnnnnnnnnnnnnnnnnnnnnnnnnnnnnnnnnnnnnnnnnnnnnnnnnnnnnnnnnnnnnnnnnnnnnnnnnnnnnnnnnnnnnnnnnnnnnnnnnnnnnnnnnnnnnnnnnnnnnnnnnnnnnnnnnnnnnnnnnnnnnnnnnnnnnnnnnnnnnnnnnnnnnnnnnnnnnnnnnnnnnnnnnnnnnnnnnnnnnnnnnnnnnnnnnnnnnnnnnnnnnnnnnnnnnnnnnnnnnnnnnnnnnnnnnnnnnnnnnnnnnnnnnnnnnnnnnnnnnnnnnnnnnnnnnnnnnnnnnnnnnnnnnnnnnnnnnnnnnnnnnnnnnnnnnnnnnnnnnnnnnnnnnnnnnnnnnnnnnnnnnnnnnnnnnnnnnnnnnnnnnnnnnnnnnnnnnnnnnnnnnnnnnnnnnnnnnnnnnnnnnnnnnnnnnnnnnnnnnnnnnnnnnnnnnnnnnnnnnnnnnnnnnnnnnnnnnnnnnnnnnnnnnnnnnnnnnnnnnnnnnnnnnnnnnnnnnnnnnnnnnnnnnnnnnnnnnnnnnnnnnnnnnnnnnnnnnnnnnnnnnnnnnnnnnnnnnnnnnnnnnnnnnnnnnnnnnnnnnnnnnnnnnnnnnnnnnnnnnnnnnnnnnnnnnnnnnnnnnnnnnnnnnnnnnnnnnnnnnnnnnnnnnnnnnnnnnnnnnnnnnnnnnnnnnnnnnnnnnnnnnnnnnnnnnnnnnnnnnnnnnnnnnnnnnnnnnnnnnnnnnnnnnnnnnnnnnnnnnnnnnnnnnnnnnnnnnnnnnnnnnnnnnnnnnnnnnnnnnnnnnnnnnnnnnnnnnnnnnnnnnnnnnnnnnnnnnnnnnnnnnnnnnnnnnnnnnnnnnnnnnnnnnnnnnnnnnnnnnnnnnnnnnnnnnnnnnnnnnnnnnnnnnnnnnnnnnnnnnnnnnnnnnnnnnnnnnnnnnnnnnnnnnnnnnnnnnnnnnnnnnnnnnnnnnnnnnnnnnnnnnnnnnnnnnnnnnnnnnnnnnnnnnnnnnnnnnnnnnnnnnnnnnnnnnnnnnnnnnnnnnnnnnnnnnnnnnnnnnnnnnnnnnnnnnnnnnnnnnnnnnnnnnnnnnnnnnnnnnnnnnnnnnnnnnnnnnnnnnnnnnnnnnnnnnnnnnnnnnnnnnnnnnnnnnnnnnnnnnnnnnnnnnnnnnnnnnnnnnnnnnnnnnnnnnnnnnnnnnnnnnnnnnnnnnnnnnnnnnnnnnnnnnnnnnnnnnnnnnnnnnnnnnnnnnnnnnnnnnnnnnnnnnnnnnnnnnnnnnnnnnnnnnnnnnnnnnnnnnnnnnnnnnnnnnnnnnnnnnnnnnnnnnnnnnnnnnnnnnnnnnnnnnnnnnnnnnnnnnnnnnnnnnnnnnnnnnnnnnnnnnnnnnnnnnnnnnnnnnnnnnnnnnnnnnnnnnnnnnnnnnnnnnnnnnnnnnnnnnnnnnnnnnnnnnnnnnnnnnnnnnnnnnnnnnnnnnnnnnnnnnnnnnnnnnnnnnnnnnnnnnnnnnnnnnnnnnnnnnnnnnnnnnnnnnnnnnnnnnnnnnnnnnnnnnnnnnnnnnnnnnnnnnnnnnnnnnnnnnnnnnnnnnnnnnnnnnnnnnnnnnnnnnnnnnnnnnnnnnnnnnnnnnnnnnnnnnnnnnnnnnnnnnnnnnnnnnnnnnnnnnnnnnnnnnnnnnnnnnnnnnnnnnnnnnnnnnnnnnnnnnnnnnnnnnnnnnnnnnnnnnnnnnnnnnnnnnnnnnnnnnnnnnnnnnnnnnnnnnnnnnnnnnnnnnnnnnnnnnnnnnnnnnnnnnnnnnnnnnnnnnnnnnnnnnnnnnnnnnnnnnnnnnnnnnnnnnnnnnnnnnnnnnnnnnnnnnnnnnnnnnnnnnnnnnnnnnnnnnnnnnnnnnnnnnnnnnnnnnnnnnnnnnnnnnnnnnnnnnnnnnnnnnnnnnnnnnnnnnnnnnnnnnnnnnnnnnnnnnnnnnnnnnnnnnnnnnnnnnnnnnnnnnnnnnnnnnnnnnnnnnnnnnnnnnnnnnnnnnnnnnnnnnnnnnnnnnnnnnnnnnnnnnnnnnnnnnnnnnnnnnnnnnnnnnnnnnnnnnnnnnnnnnnnnnnnnnnnnnnnnnnnnnnnnnnnnnnnnnnnnnnnnnnnnnnnnnnnnnnnnnnnnnnnnnnnnnnnnnnnnnnnnnnnnnnnnnnnnnnnnnnnnnnnnnnnnnnnnnnnnnnnnnnnnnnnnnnnnnnnnnnnnnnnnnnnnnnnnnnnnnnnnnnnnnnnnnnnnnnnnnnnnnnnnnnnnnnnnnnnnnnnnnnnnnnnnnnnnnnnnnnnnnnnnnnnnnnnnnnnnnnnnnnnnnnnnnnnnnnnnnnnnnnnnnnnnnnnnnnnnnnnnnnnnnnnnnnnnnnnnnnnnnnnnnnnnnnnnnnnnnnnnnnnnnnnnnnnnnnnnnnnnnnnnnnnnnnnnnnnnnnnnnnnnnnnnnnnnnnnnnnnnnnnnnnnnnnnnnnnnnnnnnnnnnnnnnnnnnnnnnnnnnnnnnnnnnnnnnnnnnnnnnnnnnnnnnnnnnnnnnnnnnnnnnnnnnnnnnnnnnnnnnnnnnnnnnnnnnnnnnnnnnnnnnnnnnnnnnnnnnnnnnnnnnnnnnnnnnnnnnnnnnnnnnnnnnnnnnnnnnnnnnnnnnnnnnnnnnnnnnnnnnnnnnnnnnnnnnnnnnnnnnnnnnnnnnnnnnnnnnnnnnnnnnnnnnnnnnnnnnnnnnnnnnnnnnnnnnnnnnnnnnnnnnnnnnnnnnnnnnnnnnnnnnnnnnnnnnnnnnnnnnnnnnnnnnnnnnnnnnnnnnnnnnnnnnnnnnnnnnnnnnnnnnnnnnnnnnnnnnnnnnnnnnnnnnnnnnnnnnnnnnnnnnnnnnnnnnnnnnnnnnnnnnnnnnnnnnnnnnnnnnnnnnnnnnnnnnnnnnnnnnnnnnnnnnnnnnnnnnnnnnnnnnnnnnnnnnnnnnnnnnnnnnnnnnnnnnnnnnnnnnnnnnnnnnnnnnnnnnnnnnnnnnnnnnnnnnnnnnnnnnnnnnnnnnnnnnnnnnnnnnnnnnnnnnnnnnnnnnnnnnnnnnnnnnnnnnnnnnnnnnnnnnnnnnnnnnnnnnnnnnnnnnnnnnnnnnnnnnnnnnnnnnnnnnnnnnnnnnnnnnnnnnnnnnnnnnnnnnnnnnnnnnnnnnnnnnnnnnnnnnnnnnnnnnnnnnnnnnnnnnnnnnnnnnnnnnnnnnnnnnnnnnnnnnnnnnnnnnnnnnnnnnnnnnnnnnnnnnnnnnnnnnnnnnnnnnnnnnnnnnnnnnnnnnnnnnnnnnnnnnnnnnnnnnnnnnnnnnnnnnnnnnnnnnnnnnnnnnnnnnnnnnnnnnnnnnnnnnnnnnnnnnnnnnnnnnnnnnnnnnnnnnnnnnnnnnnnnnnnnnnnnnnnnnnnnnnnnnnnnnnnnnnnnnnnnnnnnnnnnnnnnnnnnnnnnnnnnnnnnnnnnnnnnnnnnnnnnnnnnnnnnnnnnnnnnnnnnnnnnnnnnnnnnnnnnnnnnnnnnnnnnnnnnnnnnnnnnnnnnnnnnnnnnnnnnnnnnnnnnnnnnnnnnnnnnnnnnnnnnnnnnnnnnnnnnnnnnnnnnnnnnnnnnnnnnnnnnnnnnnnnnnnnnnnnnnnnnnnnnnnnnnnnnnnnnnnnnnnnnnnnnnnnnnnnnnnnnnnnnnnnnnnnnnnnnnnnnnnnnnnnnnnnnnnnnnnnnnnnnnnnnnnnnnnnnnnnnnnnnnnnnnnnnnnnnnnnnnnnnnnnnnnnnnnnnnnnnnnnnnnnnnnnnnnnnnnnnnnnnnnnnnnnnnnnnnnnnnnnnnnnnnnnnnnnnnnnnnnnnnnnnnnnnnnnnnnnnnnnnnnnnnnnnnnnnnnnnnnnnnnnnnnnnnnnnnnnnnnnnnnnnnnnnnnnnnnnnnnnnnnnnnnnnnnnnnnnnnnnnnnnnnnnnnnnnnnnnnnnnnnnnnnnnnnnnnnnnnnnnnnnnnnnnnnnnnnnnnnnnnnnnnnnnnnnnnnnnnnnnnnnnnnnnnnnnnnnnnnnnnnnnnnnnnnnnnnnnnnnnnnnnnnnnnnnnnnnnnnnnnnnnnnnnnnnnnnnnnnnnnnnnnnnnnnnnnnnnnnnnnnnnnnnnnnnnnnnnnnnnnnnnnnnnnnnnnnnnnnnnnnnnnnnnnnnnnnnnnnnnnnnnnnnnnnnnnnnnnnnnnnnnnnnnnnnnnnnnnnnnnnnnnnnnnnnnnnnnnnnnnnnnnnnnnnnnnnnnnnnnnnnnnnnnnnnnnnnnnnnnnnnnnnnnnnnnnnnnnnnnnnnnnnnnnnnnnnnnnnnnnnnnnnnnnnnnnnnnnnnnnnnnnnnnnnnnnnnnnnnnnnnnnnnnnnnnnnnnnnnnnnnnnnnnnnnnnnnnnnnnnnnnnnnnnnnnnnnnnnnnnnnnnnnnnnnnnnnnnnnnnnnnnnnnnnnnnnnnnnnnnnnnnnnnnnnnnnnnnnnnnnnnnnnnnnnnnnnnnnnnnnnnnnnnnnnnnnnnnnnnnnnnnnnnnnnnnnnnnnnnnnnnnnnnnnnnnnnnnnnnnnnnnnnnnnnnnnnnnnnnnnnnnnnnnnnnnnnnnnnnnnnnnnnnnnnnnnnnnnnnnnnnnnnnnnnnnnnnnnnnnnnnnnnnnnnnnnnnnnnnnnnnnnnnnnnnnnnnnnnnnnnnnnnnnnnnnnnnnnnnnnnnnnnnnnnnnnnnnnnnnnnnnnnnnnnnnnnnnnnnnnnnnnnnnnnnnnnnnnnnnnnnnnnnnnnnnnnnnnnnnnnnnnnnnnnnnnnnnnnnnnnnnnnnnnnnnnnnnnnnnnnnnnnnnnnnnnnnnnnnnnnnnnnnnnnnnnnnnnnnnnnnnnnnnnnnnnnnnnnnnnnnnnnnnnnnnnnnnnnnnnnnnnnnnnnnnnnnnnnnnnnnnnnnnnnnnnnnnnnnnnnnnnnnnnnnnnnnnnnnnnnnnnnnnnnnnnnnnnnnnnnnnnnnnnnnnnnnnnnnnnnnnnnnnnnnnnnnnnnnnnnnnnnnnnnnnnnnnnnnnnnnnnnnnnnnnnnnnnnnnnnnnnnnnnnnnnnnnnnnnnnnnnnnnnnnnnnnnnnnnnnnnnnnnnnnnnnnnnnnnnnnnnnnnnnnnnnnnnnnnnnnnnnnnnnnnnnnnnnnnnnnnnnnnnnnnnnnnnnnnnnnnnnnnnnnnnnnnnnnnnnnnnnnnnnnnnnnnnnnnnnnnnnnnnnnnnnnnnnnnnnnnnnnnnnnnnnnnnnnnnnnnnnnnnnnnnnnnnnnnnnnnnnnnnnnnnnnnnnnnnnnnnnnnnnnnnnnnnnnnnnnnnnnnnnnnnnnnnnnnnnnnnnnnnnnnnnnnnnnnnnnnnnnnnnnnnnnnnnnnnnnnnnnnnnnnnnnnnnnnnnnnnnnnnnnnnnnnnnnnnnnnnnnnnnnnnnnnnnnnnnnnnnnnnnnnnnnnnnnnnnnnnnnnnnnnnnnnnnnnnnnnnnnnnnnnnnnnnnnnnnnnnnnnnnnnnnnnnnnnnnnnnnnnnnnnnnnnnnnnnnnnnnnnnnnnnnnnnnnnnnnnnnnnnnnnnnnnnnnnnnnnnnnnnnnnnnnnnnnnnnnnnnnnnnnnnnnnnnnnnnnnnnnnnnnnnnnnnnnnnnnnnnnnnnnnnnnnnnnnnnnnnnnnnnnnnnnnnnnnnnnnnnnnnnnnnnnnnnnnnnnnnnnnnnnnnnnnnnnnnnnnnnnnnnnnnnnnnnnnnnnnnnnnnnnnnnnnnnnnnnnnnnnnnnnnnnnnnnnnnnnnnnnnnnnnnnnnnnnnnnnnnnnnnnnnnnnnnnnnnnnnnnnnnnnnnnnnnnnnnnnnnnnnnnnnnnnnnnnnnnnnnnnnnnnnnnnnnnnnnnnnnnnnnnnnnnnnnnnnnnnnnnnnnnnnnnnnnnnnnnnnnnnnnnnnnnnnnnnnnnnnnnnnnnnnnnnnnnnnnnnnnnnnnnnnnnnnnnnnnnnnnnnnnnnnnnnnnnnnnnnnnnnnnnnnnnnnnnnnnnnnnnnnnnnnnnnnnnnnnnnnnnnnnnnnnnnnnnnnnnnnnnnnnnnnnnnnnnnnnnnnnnnnnnnnnnnnnnnnnnnnnnnnnnnnnnnnnnnnnnnnnnnnnnnnnnnnnnnnnnnnnnnnnnnnnnnnnnnnnnnnnnnnnnnnnnnnnnnnnnnnnnnnnnnnnnnnnnnnnnnnnnnnnnnnnnnnnnnnnnnnnnnnnnnnnnnnnnnnnnnnnnnnnnnnnnnnnnnnnnnnnnnnnnnnnnnnnnnnnnnnnnnnnnnnnnnnnnnnnnnnnnnnnnnnnnnnnnnnnnnnnnnnnnnnnnnnnnnnnnnnnnnnnnnnnnnnnnnnnnnnnnnnnnnnnnnnnnnnnnnnnnnnnnnnnnnnnnnnnnnnnnnnnnnnnnnnnnnnnnnnnnnnnnnnnnnnnnnnnnnnnnnnnnnnnnnnnnnnnnnnnnnnnnnnnnnnnnnnnnnnnnnnnnnnnnnnnnnnnnnnnnnnnnnnnnnnnnnnnnnnnnnnnnnnnnnnnnnnnnnnnnnnnnnnnnnnnnnnnnnnnnnnnnnnnnnnnnnnnnnnnnnnnnnnnnnnnnnnnnnnnnnnnnnnnnnnnnnnnnnnnnnnnnnnnnnnnnnnnnnnnnnnnnnnnnnnnnnnnnnnnnnnnnnnnnnnnnnnnnnnnnnnnnnnnnnnnnnnnnnnnnnnnnnnnnnnnnnnnnnnnnnnnnnnnnnnnnnnnnnnnnnnnnnnnnnnnnnnnnnnnnnnnnnnnnnnnnnnnnnnnnnnnnnnnnnnnnnnnnnnnnnnnnnnnnnnnnnnnnnnnnnnnnnnnnnnnnnnnnnnnnnnnnnnnnnnnnnnnnnnnnnnnnnnnnnnnnnnnnnnnnnnnnnnnnnnnnnnnnnnnnnnnnnnnnnnnnnnnnnnnnnnnnnnnnnnnnnnnnnnnnnnnnnnnnnnnnnnnnnnnnnnnnnnnnnnnnnnnnnnnnnnnnnnnnnnnnnnnnnnnnnnnnnnnnnnnnnnnnnnnnnnnnnnnnnnnnnnnnnnnnnnnnnnnnnnnnnnnnnnnnnnnnnnnnnnnnnnnnnnnnnnnnnnnnnnnnnnnnnnnnnnnnnnnnnnnnnnnnnnnnnnnnnnnnnnnnnnnnnnnnnnnnnnnnnnnnnnnnnnnnnnnnnnnnnnnnnnnnnnnnnnnnnnnnnnnnnnnnnnnnnnnnnnnnnnnnnnnnnnnnnnnnnnnnnnnnnnnnnnnnnnnnnnnnnnnnnnnnnnnnnnnnnnnnnnnnnnnnnnnnnnnnnnnnnnnnnnnnnnnnnnnnnnnnnnnnnnnnnnnnnnnnnnnnnnnnnnnnnnnnnnnnnnnnnnnnnnnnnnnnnnnnnnnnnnnnnnnnnnnnnnnnnnnnnnnnnnnnnnnnnnnnnnnnnnnnnnnnnnnnnnnnnnnnnnnnnnnnnnnnnnnnnnnnnnnnnnnnnnnnnnnnnnnnnnnnnnnnnnnnnnnnnnnnnnnnnnnnnnnnnnnnnnnnnnnnnnnnnnnnnnnnnnnnnnnnnnnnnnnnnnnnnnnnnnnnnnnnnnnnnnnnnnnnnnnnnnnnnnnnnnnnnnnnnnnnnnnnnnnnnnnnnnnnnnnnnnnnnnnnnnnnnnnnnnnnnnnnnnnnnnnnnnnnnnnnnnnnnnnnnnnnnnnnnnnnnnnnnnnnnnnnnnnnnnnnnnnnnnnnnnnnnnnnnnnnnnnnnnnnnnnnnnnnnnnnnnnnnnnnnnnnnnnnnnnnnnnnnnnnnnnnnnnnnnnnnnnnnnnnnnnnnnnnnnnnnnnnnnnnnnnnnnnnnnnnnnnnnnnnnnnnnnnnnnnnnnnnnnnnnnnnnnnnnnnnnnnnnnnnnnnnnnnnnnnnnnnnnnnnnnnnnnnnnnnnnnnnnnnnnnnnnnnnnnnnnnnnnnnnnnnnnnnnnnnnnnnnnnnnnnnnnnnnnnnnnnnnnnnnnnnnnnnnnnnnnnnnnnnnnnnnnnnnnnnnnnnnnnnnnnnnnnnnnnnnnnnnnnnnnnnnnnnnnnnnnnnnnnnnnnnnnnnnnnnnnnnnnnnnnnnnnnnnnnnnnnnnnnnnnnnnnnnnnnnnnnnnnnnnnnnnnnnnnnnnnnnnnnnnnnnnnnnnnnnnnnnnnnnnnnnnnnnnnnnnnnnnnnnnnnnnnnnnnnnnnnnnnnnnnnnnnnnnnnnnnnnnnnnnnnnnnnnnnnnnnnnnnnnnnnnnnnnnnnnnnnnnnnnnnnnnnnnnnnnnnnnnnnnnnnnnnnnnnnnnnnnnnnnnnnnnnnnnnnnnnnnnnnnnnnnnnnnnnnnnnnnnnnnnnnnnnnnnnnnnnnnnnnnnnnnnnnnnnnnnnnnnnnnnnnnnnnnnnnnnnnnnnnnnnnnnnnnnnnnnnnnnnnnnnnnnnnnnnnnnnnnnnnnnnnnnnnnnnnnnnnnnnnnnnnnnnnnnnnnnnnnnnnnnnnnnnnnnnnnnnnnnnnnnnnnnnnnnnnnnnnnnnnnnnnnnnnnnnnnnnnnnnnnnnnnnnnnnnnnnnnnnnnnnnnnnnnnnnnnnnnnnnnnnnnnnnnnnnnnnnnnnnnnnnnnnnnnnnnnnnnnnnnnnnnnnnnnnnnnnnnnnnnnnnnnnnnnnnnnnnnnnnnnnnnnnnnnnnnnnnnnnnnnnnnnnnnnnnnnnnnnnnnnnnnnnnnnnnnnnnnnnnnnnnnnnnnnnnnnnnnnnnnnnnnnnnnnnnnnnnnnnnnnnnnnnnnnnnnnnnnnnnnnnnnnnnnnnnnnnnnnnnnnnnnnnnnnnnnnnnnnnnnnnnnnnnnnnnnnnnnnnnnnnnnnnnnnnnnnnnnnnnnnnnnnnnnnnnnnnnnnnnnnnnnnnnnnnnnnnnnnnnnnnnnnnnnnnnnnnnnnnnnnnnnnnnnnnnnnnnnnnnnnnnnnnnnnnnnnnnnnnnnnnnnnnnnnnnnnnnnnnnnnnnnnnnnnnnnnnnnnnnnnnnnnnnnnnnnnnnnnnnnnnnnnnnnnnnnnnnnnnnnnnnnnnnnnnnnnnnnnnnnnnnnnnnnnnnnnnnnnnnnnnnnnnnnnnnnnnnnnnnnnnnnnnnnnnnnnnnnnnnnnnnnnnnnnnnnnnnnnnnnnnnnnnnnnnnnnnnnnnnnnnnnnnnnnnnnnnnnnnnnnnnnnnnnnnnnnnnnnnnnnnnnnnnnnnnnnnnnnnnnnnnnnnnnnnnnnnnnnnnnnnnnnnnnnnnnnnnnnnnnnnnnnnnnnnnnnnnnnnnnnnnnnnnnnnnnnnnnnnnnnnnnnnnnnnnnnnnnnnnnnnnnnnnnnnnnnnnnnnnnnnnnnnnnnnnnnnnnnnnnnnnnnnnnnnnnnnnnnnnnnnnnnnnnnnnnnnnnnnnnnnnnnnnnnnnnnnnnnnnnnnnnnnnnnnnnnnnnnnnnnnnnnnnnnnnnnnnnnnnnnnnnnnnnnnnnnnnnnnnnnnnnnnnnnnnnnnnnnnnnnnnnnnnnnnnnnnnnnnnnnnnnnnnnnnnnnnnnnnnnnnnnnnnnnnnnnnnnnnnnnnnnnnnnnnnnnnnnnnnnnnnnnnnnnnnnnnnnnnnnnnnnnnnnnnnnnnnnnnnnnnnnnnnnnnnnnnnnnnnnnnnnnnnnnnnnnnnnnnnnnnnnnnnnnnnnnnnnnnnnnnnnnnnnnnnnnnnnnnnnnnnnnnnnnnnnnnnnnnnnnnnnnnnnnnnnnnnnnnnnnnnnnnnnnnnnnnnnnnnnnnnnnnnnnnnnnnnnnnnnnnnnnnnnnnnnnnnnnnnnnnnnnnnnnnnnnnnnnnnnnnnnnnnnnnnnnnnnnnnnnnnnnnnnnnnnnnnnnnnnnnnnnnnnnnnnnnnnnnnnnnnnnnnnnnnnnnnnnnnnnnnnnnnnnnnnnnnnnnnnnnnnnnnnnnnnnnnnnnnnnnnnnnnnnnnnnnnnnnnnnnnnnnnnnnnnnnnnnnnnnnnnnnnnnnnnnnnnnnnnnnnnnnnnnnnnnnnnnnnnnnnnnnnnnnnnnnnnnnnnnnnnnnnnnnnnnnnnnnnnnnnnnnnnnnnnnnnnnnnnnnnnnnnnnnnnnnnnnnnnnnnnnnnnnnnnnnnnnnnnnnnnnnnnnnnnnnnnnnnnnnnnnnnnnnnnnnnnnnnnnnnnnnnnnnnnnnnnnnnnnnnnnnnnnnnnnnnnnnnnnnnnnnnnnnnnnnnnnnnnnnnnnnnnnnnnnnnnnnnnnnnnnnnnnnnnnnnnnnnnnnnnnnnnnnnnnnnnnnnnnnnnnnnnnnnnnnnnnnnnnnnnnnnnnnnnnnnnnnnnnnnnnnnnnnnnnnnnnnnnnnnnnnnnnnnnnnnnnnnnnnnnnnnnnnnnnnnnnnnnnnnnnnnnnnnnnnnnnnnnnnnnnnnnnnnnnnnnnnnnnnnnnnnnnnnnnnnnnnnnnnnnnnnnnnnnnnnnnnnnnnnnnnnnnnnnnnnnnnnnnnnnnnnnnnnnnnnnnnnnnnnnnnnnnnnnnnnnnnnnnnnnnnnnnnnnnnnnnnnnnnnnnnnnnnnnnnnnnnnnnnnnnnnnnnnnnnnnnnnnnnnnnnnnnnnnnnnnnnnnnnnnnnnnnnnnnnnnnnnnnnnnnnnnnnnnnnnnnnnnnnnnnnnnnnnnnnnnnnnnnnnnnnnnnnnnnnnnnnnnnnnnnnnnnnnnnnnnnnnnnnnnnnnnnnnnnnnnnnnnnnnnnnnnnnnnnnnnnnnnnnnnnnnnnnnnnnnnnnnnnnnnnnnnnnnnnnnnnnnnnnnnnnnnnnnnnnnnnnnnnnnnnnnnnnnnnnnnnnnnnnnnnnnnnnnnnnnnnnnnnnnnnnnnnnnnnnnnnnnnnnnnnnnnnnnnnnnnnnnnnnnnnnnnnnnnnnnnnnnnnnnnnnnnnnnnnnnnnnnnnnnnnnnnnnnnnnnnnnnnnnnnnnnnnnnnnnnnnnnnnnnnnnnnnnnnnnnnnnnnnnnnnnnnnnnnnnnnnnnnnnnnnnnnnnnnnnnnnnnnnnnnnnnnnnnnnnnnnnnnnnnnnnnnnnnnnnnnnnnnnnnnnnnnnnnnnnnnnnnnnnnnnnnnnnnnnnnnnnnnnnnnnnnnnnnnnnnnnnnnnnnnnnnnnnnnnnnnnnnnnnnnnnnnnnnnnnnnnnnnnnnnnnnnnnnnnnnnnnnnnnnnnnnnnnnnnnnnnnnnnnnnnnnnnnnnnnnnnnnnnnnnnnnnnnnnnnnnnnnnnnnnnnnnnnnnnnnnnnnnnnnnnnnnnnnnnnnnnnnnnnnnnnnnnnnnnnnnnnnnnnnnnnnnnnnnnnnnnnnnnnnnnnnnnnnnnnnnnnnnnnnnnnnnnnnnnnnnnnnnnnnnnnnnnnnnnnnnnnnnnnnnnnnnnnnnnnnnnnnnnnnnnnnnnnnnnnnnnnnnnnnnnnnnnnnnnnnnnnnnnnnnnnnnnnnnnnnnnnnnnnnnnnnnnnnnnnnnnnnnnnnnnnnnnnnnnnnnnnnnnnnnnnnnnnnnnnnnnnnnnnnnnnnnnnnnnnnnnnnnnnnnnnnnnnnnnnnnnnnnnnnnnnnnnnnnnnnnnnnnnnnnnnnnnnnnnnnnnnnnnnnnnnnnnnnnnnnnnnnnnnnnnnnnnnnnnnnnnnnnnnnnnnnnnnnnnnnnnnnnnnnnnnnnnnnnnnnnnnnnnnnnnnnnnnnnnnnnnnnnnnnnnnnnnnnnnnnnnnnnnnnnnnnnnnnnnnnnnnnnnnnnnnnnnnnnnnnnnnnnnnnnnnnnnnnnnnnnnnnnnnnnnnnnnnnnnnnnnnnnnnnnnnnnnnnnnnnnnnnnnnnnnnnnnnnnnnnnnnnnnnnnnnnnnnnnnnnnnnnnnnnnnnnnnnnnnnnnnnnnnnnnnnnnnnnnnnnnnnnnnnnnnnnnnnnnnnnnnnnnnnnnnnnnnnnnnnnnnnnnnnnnnnnnnnnnnnnnnnnnnnnnnnnnnnnnnnnnnnnnnnnnnnnnnnnnnnnnnnnnnnnnnnnnnnnnnnnnnnnnnnnnnnnnnnnnnnnnnnnnnnnnnnnnnnnnnnnnnnnnnnnnnnnnnnnnnnnnnnnnnnnnnnnnnnnnnnnnnnnnnnnnnnnnnnnnnnnnnnnnnnnnnnnnnnnnnnnnnnnnnnnnnnnnnnnnnnnnnnnnnnnnnnnnnnnnnnnnnnnnnnnnnnnnnnnnnnnnnnnnnnnnnnnnnnnnnnnnnnnnnnnnnnnnnnnnnnnnnnnnnnnnnnnnnnnnnnnnnnnnnnnnnnnnnnnnnnnnnnnnnnnnnnnnnnnnnnnnnnnnnnnnnnnnnnnnnnnnnnnnnnnnnnnnnnnnnnnnnnnnnnnnnnnnnnnnnnnnnnnnnnnnnnnnnnnnnnnnnnnnnnnnnnnnnnnnnnnnnnnnnnnnnnnnnnnnnnnnnnnnnnnnnnnnnnnnnnnnnnnnnnnnnnnnnnnnnnnnnnnnnnnnnnnnnnnnnnnnnnnnnnnnnnnnnnnnnnnnnnnnnnnnnnnnnnnnnnnnnnnnnnnnnnnnnnnnnnnnnnnnnnnnnnnnnnnnnnnnnnnnnnnnnnnnnnnnnnnnnnnnnnnnnnnnnnnnnnnnnnnnnnnnnnnnnnnnnnnnnnnnnnnnnnnnnnnnnnnnnnnnnnnnnnnnnnnnnnnnnnnnnnnnnnnnnnnnnnnnnnnnnnnnnnnnnnnnnnnnnnnnnnnnnnnnnnnnnnnnnnnnnnnnnnnnnnnnnnnnnnnnnnnnnnnnnnnnnnnnnnnnnnnnnnnnnnnnnnnnnnnnnnnnnnnnnnnnnnnnnnnnnnnnnnnnnnnnnnnnnnnnnnnnnnnnnnnnnnnnnnnnnnnnnnnnnnnnnnnnnnnnnnnnnnnnnnnnnnnnnnnnnnnnnnnnnnnnnnnnnnnnnnnnnnnnnnnnnnnnnnnnnnnnnnnnnnnnnnnnnnnnnnnnnnnnnnnnnnnnnnnnnnnnnnnnnnnnnnnnnnnnnnnnnnnnnnnnnnnnnnnnnnnnnnnnnnnnnnnnnnnnnnnnnnnnnnnnnnnnnnnnnnnnnnnnnnnnnnnnnnnnnnnnnnnnnnnnnnnnnnnnnnnnnnnnnnnnnnnnnnnnnnnnnnnnnnnnnnnnnnnnnnnnnnnnnnnnnnnnnnnnnnnnnnnnnnnnnnnnnnnnnnnnnnnnnnnnnnnnnnnnnnnnnnnnnnnnnnnnnnnnnnnnnnnnnnnnnnnnnnnnnnnnnnnnnnnnnnnnnnnnnnnnnnnnnnnnnnnnnnnnnnnnnnnnnnnnnnnnnnnnnnnnnnnnnnnnnnnnnnnnnnnnnnnnnnnnnnnnnnnnnnnnnnnnnnnnnnnnnnnnnnnnnnnnnnnnnnnnnnnnnnnnnnnnnnnnnnnnnnnnnnnnnnnnnnnnnnnnnnnnnnnnnnnnnnnnnnnnnnnnnnnnnnnnnnnnnnnnnnnnnnnnnnnnnnnnnnnnnnnnnnnnnnnnnnnnnnnnnnnnnnnnnnnnnnnnnnnnnnnnnnnnnnnnnnnnnnnnnnnnnnnnnnnnnnnnnnnnnnnnnnnnnnnnnnnnnnnnnnnnnnnnnnnnnnnnnnnnnnnnnnnnnnnnnnnnnnnnnnnnnnnnnnnnnnnnnnnnnnnnnnnnnnnnnnnnnnnnnnnnnnnnnnnnnnnnnnnnnnnnnnnnnnnnnnnnnnnnnnnnnnnnnnnnnnnnnnnnnnnnnnnnnnnnnnnnnnnnnnnnnnnnnnnnnnnnnnnnnnnnnnnnnnnnnnnnnnnnnnnnnnnnnnnnnnnnnnnnnnnnnnnnnnnnnnnnnnnnnnnnnnnnnnnnnnnnnnnnnnnnnnnnnnnnnnnnnnnnnnnnnnnnnnnnnnnnnnnnnnnnnnnnnnnnnnnnnnnnnnnnnnnnnnnnnnnnnnnnnnnnnnnnnnnnnnnnnnnnnnnnnnnnnnnnnnnnnnnnnnnnnnnnnnnnnnnnnnnnnnnnnnnnnnnnnnnnnnnnnnnnnnnnnnnnnnnnnnnnnnnnnnnnnnnnnnnnnnnnnnnnnnnnnnnnnnnnnnnnnnnnnnnnnnnnnnnnnnnnnnnnnnnnnnnnnnnnnnnnnnnnnnnnnnnnnnnnnnnnnnnnnnnnnnnnnnnnnnnnnnnnnnnnnnnnnnnnnnnnnnnnnnnnnnnnnnnnnnnnnnnnnnnnnnnnnnnnnnnnnnnnnnnnnnnnnnnnnnnnnnnnnnnnnnnnnnnnnnnnnnnnnnnnnnnnnnnnnnnnnnnnnnnnnnnnnnnnnnnnnnnnnnnnnnnnnnnnnnnnnnnnnnnnnnnnnnnnnnnnnnnnnnnnnnnnnnnnnnnnnnnnnnnnnnnnnnnnnnnnnnnnnnnnnnnnnnnnnnnnnnnnnnnnnnnnnnnnnnnnnnnnnnnnnnnnnnnnnnnnnnnnnnnnnnnnnnnnnnnnnnnnnnnnnnnnnnnnnnnnnnnnnnnnnnnnnnnnnnnnnnnnnnnnnnnnnnnnnnnnnnnnnnnnnnnnnnnnnnnnnnnnnnnnnnnnnnnnnnnnnnnnnnnnnnnnnnnnnnnnnnnnnnnnnnnnnnnnnnnnnnnnnnnnnnnnnnnnnnnnnnnnnnnnnnnnnnnnnnnnnnnnnnnnnnnnnnnnnnnnnnnnnnnnnnnnnnnnnnnnnnnnnnnnnnnnnnnnnnnnnnnnnnnnnnnnnnnnnnnnnnnnnnnnnnnnnnnnnnnnnnnnnnnnnnnnnnnnnnnnnnnnnnnnnnnnnnnnnnnnnnnnnnnnnnnnnnnnnnnnnnnnnnnnnnnnnnnnnnnnnnnnnnnnnnnnnnnnnnnnnnnnnnnnnnnnnnnnnnnnnnnnnnnnnnnnnnnnnnnnnnnnnnnnnnnnnnnnnnnnnnnnnnnnnnnnnnnnnnnnnnnnnnnnnnnnnnnnnnnnnnnnnnnnnnnnnnnnnnnnnnnnnnnnnnnnnnnnnnnnnnnnnnnnnnnnnnnnnnnnnnnnnnnnnnnnnnnnnnnnnnnnnnnnnnnnnnnnnnnnnnnnnnnnnnnnnnnnnnnnnnnnnnnnnnnnnnnnnnnnnnnnnnnnnnnnnnnnnnnnnnnnnnnnnnnnnnnnnnnnnnnnnnnnnnnnnnnnnnnnnnnnnnnnnnnnnnnnnnnnnnnnnnnnnnnnnnnnnnnnnnnnnnnnnnnnnnnnnnnnnnnnnnnnnnnnnnnnnnnnnnnnnnnnnnnnnnnnnnnnnnnnnnnnnnnnnnnnnnnnnnnnnnnnnnnnnnnnnnnnnnnnnnnnnnnnnnnnnnnnnnnnnnnnnnnnnnnnnnnnnnnnnnnnnnnnnnnnnnnnnnnnnnnnnnnnnnnnnnnnnnnnnnnnnnnnnnnnnnnnnnnnnnnnnnnnnnnnnnnnnnnnnnnnnnnnnnnnnnnnnnnnnnnnnnnnnnnnnnnnnnnnnnnnnnnnnnnnnnnnnnnnnnnnnnnnnnnnnnnnnnnnnnnnnnnnnnnnnnnnnnnnnnnnnnnnnnnnnnnnnnnnnnnnnnnnnnnnnnnnnnnnnnnnnnnnnnnnnnnnnnnnnnnnnnnnnnnnnnnnnnnnnnnnnnnnnnnnnnnnnnnnnnnnnnnnnnnnnnnnnnnnnnnnnnnnnnnnnnnnnnnnnnnnnnnnnnnnnnnnnnnnnnnnnnnnnnnnnnnnnnnnnnnnnnnnnnnnnnnnnnnnnnnnnnnnnnnnnnnnnnnnnnnnnnnnnnnnnnnnnnnnnnnnnnnnnnnnnnnnnnnnnnnnnnnnnnnnnnnnnnnnnnnnnnnnnnnnnnnnnnnnnnnnnnnnnnnnnnnnnnnnnnnnnnnnnnnnnnnnntgtaaaagagaccttccttttaaatgtcttgtagtacacgtctgctggtaatgaattctgtgtttatttgtctgaagaaatgtatttttatcaccttctgttgtgaccggaattgtgtcccccctcctaaaattcctatgttgaagtcttaaccctcagtacctcagagtgtgactatgtttagagataagacctttaaagagataattaagttaaaatgaggccattacggtgagccctgatgcattgtaactgatgtccttttaagagacacgccacggtacacacacacaggaaaataccacgtaagggcaaagctagaaggtggccatcggggggaaaccaaggacagagaggcctcagaagaaataaaacctgctaatactttggtgttcgacttctggcttccagagctgtgagaaagttcacttctgttgtttaagccacccagactggtattttgttacggcagccctagaaaactgtacaccttgtttttgagatgttctctgggcagagatttcttggttgacaaggattttcttttggcttgtatagtttctgctgaggtctgctatattcatgtagctttgttttggggtgagtgagttggttggttggttggttggttgatataccatgctcttttttctccggaggctttcaagatattctctttatctttagttttcaaccatttgatgataatgtacctagttgtgtttttctgtatatttatcctgtttggaattctctgagccccttctctggatctgtgttttgttgtctttcgttaattttggaaaattcttggccattatctcttcagatgtatcttctgccacctgtctcttctccttttgtaactactgttatgtatttgttagatcatttgatattgtcccatatctcttggatttctgttttgttttgttttctatattttcttattatacttgaagttttctgtgatcagtttgcataatttatattgatctatacttgagttcactttgtgtgtgtgtgtcataattttttattaannnnnnnnnnnnnnnnnnnnnnnnnnnnnnnnnnnnnnnnnnnnnnnnnnnnnnnnnnnnnnnnnnnnnnnnnnnnnnnnnnnnnnnnnnnnnnnnnnnnnnnnnnnnnnnnnnnnnnnnnnnnnnnnnnnnnnnnnnnnnnnnnnnnnnnnnnnnnnnnnnnnnnnnnnnnnnnnnnnnnnnnnnnnnnnnnnnnnnnnnnnnnnnnnnnnnnnnnnnnnnnnnnnnnnnnnnnnnnnnnnnnnnnnnnnnnnnnnnnnnnnnnnnnnnnnnnnnnnnnnnnnnnnnnnnnnnnnnnnnnnnnnnnnnnnnnnnnnnnnnnnnnnnnnnnnnnnnnnnnnnnnnnnnnnnnnnnnnnnnnnnnnnnnnnnnnnnnnnnnnnnnnnnnnnnnnnnnnnnnnnnnnnnnnnnnnnnnnnnnnnnnnnnnnnnnnnnnnnnnnnnnnnnnnnnnnnnnnnnnnnnnnnnnnnnnnnnnnnnnnnnnnnnnnnnnnnnnnnnnnnnnnnnnnnnnnnnnnnnnnnnnnnnnnnnnnnnnnnnnnnnnnnnnnnnnnnnnnnnnnnnnnnnnnnnnnnnnnnnnnnnnnnnnnnnnnnnnnnnnnnnnnnnnnnnnnnnnnnnnnnnnnnnnnnnnnnnnnnnnnnnnnnnnnnnnnnnnnnnnnnnnnnnnnnnacacacagcttttcctgtcacagtggggcaggctccaggcactgaagtctttctggcccttttctgggtctcgtgttcttaaagaatgatagcctgagaatcagaagggaaacaagatgttctttctgctcacccaatttggaaaatctcttccctggcacattttttttttttcttcatgtcaaaggaaagtccagggtgcaggtggaactcatggagctgtcctcactggagccagtcacgcctgtgctcatacacgccagaacacggctggatttctcgtgctcctgctctgccctgtgttggcaggcccacagctctgcaccgtagagggagtgctccgtcagtttcctgctctgtgcccggtctttccaacaaagccagtgggaggccgtggaagagctggatagtgggtgtgtactcctttgtgtctggggctctgagggattcgaatctgtcaagctgttttcgaatctgtcaagctgttttcttcctgcccactttatggctgccacctcttcctcctctgttctacccagaggcgtgtcccatctctcctccggtgggctcgttacctgtgaattcagttcacctggttaccttgggactgccgctctgatgagctaaaaaaaaaatttttttttttattttgtagattgtccagcctattcttgttagtgtgaaaacaatgttcttttagggatttctacattctgtacagaagtgggactccttataagcttggagtattgtcagtttgcaagttaaaagaagaaaatacacaaagggcattattttaaggctttcagcatctcctggtcctttgcacatgtttacacaaagttctctttattcagcaccctcaagttctgcctacttggacagctgtagtctattaagcttaagtgccaatttttaagtacatttctgtatagaatacatataaaagatgatgaaaacagcccattgcgtatgcattcttaagctttttgagtgctgatagataactggtactttaaacttgtccttacttggataggagaggtggactatttgaagagccagagagagaacatggtaacgtctgatgtccttaaagaatgatagtatgaggccgggtgcagtgactcacgcctgtaatcgtagcacattttgaggccaagccaggcagatcacttgaggccaggagttcgagaccagcctggccaacatggcaaagcccctctttacaaaattacaaaaattagccaggcgggcgtggtagcacactccagtaatcccagcaacttgagatgctgaggcgggagaatcgctgggaactcaggaggcagaggttgcagtgagccaagatcgcgccactacactcagccctgggggactgagggaaactccgttccccccactcctgccgcaacaccggttggggtgttccttctgctcaaccagtttgaaaaatctcttttgaccaaataaaaataaaacccaaggaacatactcaagagaatggtccccacatcttacacatactcattctctctcactctctctctctctctctctcacacacacacacacacacacacacacacacacaggtgcgcacagagtggcatagtagaaaaataatgacactgggtaaaacagatctgggttcaaagtccagctccatcactttctggctttgggacatgcaacaactcttaatccttctgagccctacctggtcttttcaactctaaaatagggataatacttggcccccaggattgctttaggcttaatgagatattattacctagatagttacaaagaggccaggcctggtggctcacgcctataatcccagtgctttgggaagtgggaggattgcttgaggccaagagttcaaggccagcccaggcagtgtagtgagaccctgtctgtacaaaaaataaaaataaaataaattagccaggcgtggtggcacacacctgtagtcccagctactcaggaggctgagatgggaggatccacttgagcccatgagttcaagactgtagtgagctatgactgtatcactgcactctcgcctaggcaacagagcaagacactgtctcttataaaaaaataaatccagagatgagaatttaaattttttgtcagagttataaactgaaaaattaaaactcactgctatgaatagattcaaggcagagcctgagaaggaattaggaagtaaagacttaaccattgtgtcagaattccgtaacggtccatttaggaaatacgaggaatgctgtcgttttattcctggtgctataccatcgactgaactggcactgatttactccaagtggaatgttccatttttgaaagttagataaacccatagaactatcaggtttttttatcagacttcctgtggtaagttaatgacagttcaacaggattgctagctggcagagcatgatgaacttctttctggctctcccttgaatgtgttcatagcagtgacttttcatttttgcattttgtaagtctgcccccaaatttttactctctggagttttctttgggcatgatatattcattcggattgaactgaattagtagatgggcacgtggatgataggcaggcagacgtgcacgaggaccacttgctgtgggtccgcttcagtgcatgatggaaggtaagggcgcagattttagagtcagacacacttgaatttgctttgtttcccctccacttcctattcgatctgaattttttccacatctctgtatctgttccttcatcttgcagtggacataatgctgttgtgagaattacaatgcttagaggtggtagcggttattgctgttgtcatcatcatcattttcagctagtattttcccaagaagcagcctgataggcccacaccaatcttggaattttcccttgttctagaatgttgagcatggaaaatctgaccttacgtcttcttacttctgggctttcttcatgtcaaactccctgtcattctgtgtccatgttgtcatccaagaaagcggtcttaaacatgcgtattttaggagtcacaaaaaattatttgcagaggattccagaagaaggtttcctctgtgaaaaccttcccttaccattttttacataatatatatattatttctatttttgtccccaggcttttttctttattgtgtgtgattgtatcagattaactttaatgaaacatttcaagcatttggaaaagtatagcaattaatataacattacctttttacccagaattaacaaatattactttgtcctatctgcttcagatctttttaaatgctggagtatgatattgtgatataataagaaatatatatttggcctctgcccctagttccttatacacagctcctaaagctcttggaatctccggagtgatgcttgtttgtgtttttaatgctaatagatgactggtggctgggagctctggttggagattggttgccaaggggaccaaccttgtgatagatggttgggactctccagcccacaccccagcctctagggagaggaggggagctgcaggttgagttgactgcccatggccaacgatgtaattaatcatgcctacttaatgaatcctccgtaaacactctaaaggatagtgtccagatgggttccagattgccagcagaacacacggaggtgtgggagggtagtgcccagagagatcatggaagctgcacacccctctccacatgccttgccctgtgcatctcttcatctgcctgttcatttgtgttatcctttgaaatatcctttgtaataaatgggtaaacataagtaaagtgtttccccaagtcccgtaagccgttctatcaaatgaacctaatccgaggaagggatcttgggaactccggtttataactggtcagtcagaagcacagctcacaacctgtgattggcatctgaagctggagggtggatgttgtgggactgagcccttaatctggggggtctgacgctgtctccaggtaacttgtgtcagaattgaattaaattataagacacccagttggtgtctgctggagaatctgggtcagaagagttgtgctgactctgtgagattaggaagaacactttgttttttctgttttttcctgcctctaataataattaaagtcttctttgtatctcttctcagctgtatttttcttttttcaactacagtggcagccactgtcctaaattggtgtgcttttttatagtccatagttttagctttttaatacatgtatgtttccataaacaatgtacaatattgttgagtgtgatataaatttgaaatatatggtctcatactagttaggctgtcagttcattattacttaactgaactcaggccctctagtcatttgataatagaagaaaacatattcttgaagtttttcagagaggatgattcttagaactttttttttatggtcctggagccctaaagaagccttctttaaagaaaatagattgaggtaatgtcaagggggaacactattgtggtacaaagtgccttgacctagcactaagaaaaaggttttatgaaattcaggaattttaaaaattgatacacaatagaaatgcatatttttggagtatggataatttgatacattcatatactgtgtaaagataaatcggaataattgggatatctgtcaccttaaatacgttcctttcttaatgctaggaaccttgaaattctcttctcatcttcgtaaaatgtacaacagattaacattaactgtggtcaccctattgatctatagaacactgggtcttacttctatctaactatatttttacccactcatcaacctctcttccgcatgccgcagccccttcctggcctctcaagttcagttttagatttaagcatcttctctgtttactttaggatgctcccatatttgaccactgtcagttagctttcagaatcacaggtcacggaaattccaggtccagaggttctgcactgcacttagaacttctcctcatatataagatgccctggttgcaccgccaagccctattgccatctgttggacaggaagccttttagtgcctccatggatctagcactgacatcagctaacatagaactaacatctactcagggagttgcgttagtggctcttaagttgaactccatgaaaattgtgagaaaacttccatggaaacgtttttgacaaatcacctctcccttgtatataaatgcaaaccgtttttcattttcaaaatttccaactttttcatagaactcaaggatttgagtcctgcttcctttgagaggggtaacagtgggttttacataaacattgtgtgtgattttaaaaggcagtactgaacatgtgctacacgttaagtcctgagtttggaaagatgcaaccgagtgggaaagttggatatccgcaggtgcagatgctggaaagacctcgctcacatagtgatctttctcgtagctgcaagtgactgttcagctttccagtgaggtgaggaaacatttatgggcctcctatggctctcctcttcgttcaccgctgtgctgtgcaacacaatttccctgcaacaatgaacttcaacttttccatttgtcaccagtgcaatggctcacgtagttaaaaagcgaatgcggtgaccaatttgggacgtcatactgttcttcagtcaaagtatcctaatttgaagactttttatgtatcgtgattttacaccaaatggccagagtcagtctgattaaatagatttggttttggctacctatatgtagttaatgctacacactttaaatagtttggtttgccggtattttttgaaggcttaagtatttggtttctatttctttgggtttcctgtctgtagattcaaccaagcatatgttgttgaaataatgaactcagggccactttaccccgagctgcaatcttgtcaagtcccagcagctaagtaaacttgggtcaggtcagatttgagacgccttatgaccaagaagatactgtttctaaacatcttgtatacatgaaagaacagccattattttatcgcttcaaggtaattttcttatcttgttcatgttatgttttttacttcttttgaattatataaaattggaagttatatttataatattgttgtaatgtaagaccgagggggagcacacatcagaagatggaataagcaagcagaagctcaggtctgagtctcacagtactccagatgcagtgagtggttctggagctgtacttctcagagagggtggccgctctcagggaggtggggccatcaggatcacagaagaacttcgttcccttctgcattcccatccccataattctaataatctagagaaaatgaagagagaaaaaataaggtgaagccaggagtgagctcacaggcactgtcagagatttaattattgtcatgcgctacgtaacaatatttcagtcgttgacggaccccatattccatagcgctcccataagacgagaagaccatatttttactgtaccttgtctatgtttagatatgtttggatgcagaaacaccactgtgttccagttgcctacagtcttcagtagagtcacatgctgtacaggtttgtagcgtaggagcaataggctgtaccgtaccccctcggtgcgtagcagccatgccaccgagatctgtgtaagtcactctatgatgttcccacaacaagatcacctgacgatgcatttctcagactgtatccccaccattaggtgacatgtctgtagtacgcagtttatagtaccccacaatattgaaacaaaaacagaaaaagaaatttctccctcatgggtcctcagaaagagccctgatgcttacaagcagcgcgtccttccgtatgtcccgccgtgagggccggaaggcttctttttttaagaaacatctcagcaatagaataaggccaaagttcatctcataaaaaccattttctaggagaccataaatattgctacccaagtactcagatatctaatatattatttaacattgggaataaatttccaagtctttggaaagatttagacaatactctctaaatagttgtcctgaccaaatttttttgtacattaagcagcagtatgtttaggatctagtctttgacagataccagaatgtagctattcagtgttcctttgaagtgtagagtcatacactttaaaagttaatcgaaaaaggaaaaaaaaaaattagccaagtatggtgcatgcctgtggtcccagctacttgggtggctgaagcgggagggtcacttgagtccagcaggttgaggctgcagtgagccaagatagcaccactgccctccagcctgggccacaaagcgagaccctgtctcaaaaaaaaaaaaaaaaaaaaaaaacagtcaatctgccccttccccttaattgtggctgaggaatcggctgccatggtcagtgaggctggtgccaagtattcaactgatgtagccaaatgctggcaggacaaaggcagcgggtttgaccggcgtggctggcgtatttggtagtggagctggtcctcaggcaggacaaaggcagcgggtttgaccggcgtggctggcgtatttggtagtggagctggtcctcaggcaggacaaaggcagcgggttggaccggcgtggctggcgtatttggtagtggagctggtcctcaggcaggacaaaggcagcgggtttgaccggcgtggctggcgtatttggtagtggagctggtcctcaggcaggacaaaggcagcgggttggaccggcgtggctggcgtatgtggtagtggagctggtcctcaggatcgtgccctgggcatttggcaggaccctggattctgctagcgtagctggtgcgtttgtcatccgggaccaagaagccagcccatgtggccgacatttttggccggcaagggctgaggattcggctagcaggagtggaaaagcaggccagggccaagaaggtggcccacgtggttgggagactggttacataccaggagatcaagcagattagaaaatatgttggggctaatacattgaggataatgtgtttgtcattatagaagataagagtaccagatacagaaagagtaaagacaaaccctgtcgtattggattgtttttagaggtattgatatgaattcatggtttttaacagataaatagatttagatttctctgtgtgtatgtgtgtctttatatgtgtatatatacatatatacacatgtatttattttctttttttttttttttgagacggaatctggctctgtcaccaggctggagtgcagtggcgcaatcttggctcactgcaacctccgcctcccaggttcaagcagttctcctgcctcagcctcccaggtagctgggactacaggcgtgcaccaccacacccgcctaatttttgtatttttagtagagacggggtttcaccatgttggccaggatagtctcagtctcttcaccttgtgatccacccgcctcggcctcccaaagtgctgggattacaggcatgagccaccgcgcctggctcttatttattttttttgagatggagtttcgctcttgttgcccaggctaaagtgcaatggtacaatcttggctcactgcaacctccacctcccaggttcaagggattctcctgcctcagcctcccgagtaactgaatcaaattacaggcatgcaccaccacgcctggctaattgtgtatttttagtagagacggggttcctccatgtcggtcaggctggtcttgaactcctgacctcaggtgatccgcccgccttggcctcccaaagcatgtatgtattttctaaccttatctgccgaagggacctagaagcagtgagaccaggaacagagagctcactgagagctcgaatgtcggtttccagacgcctttcccactcgaaggaaccagagccctttggggaaaggactgagtccagggctgtgtgtgggaaagcacatgagaatcgcagagcagttttataccagaaagtaggacacgttcccggagtgctgggaatatgtcgaaacaacatggggacagtcttgagtaatttgagcatcaaaatgagtaatgatagtaacagattataacagctaaggtacagagagtagtgcctaaatctttgcaaagacttgaaaatgtatttcctatattaaatcatacattagatttctgagtacttgggcagcaatatttagggtctcctagaaaatggtttctatgaaatgaactttgacattatgatattgcagagattttttttttaaaagaaatctctgaacctcatggctgtatatctggaaggatgctgaggatgttgcttacaattagacttgttatgaggacccagggggagaaatttctttcggatctcaggactagaaataacccatattctattgaataaaatagaaatctgtgagtctatgatggtataaagaaatgaatgaatgaatgaaccagtaaatgggggagaaaggaaaactctaccctgtagctgatgccagcgtaatgtcgacagaattatggaattagagaatctccatttggcaccattatagtagtaactgatttgggcaagtatcatcagtgaatgtgaaaacactgggtgaaggtttactaagaacagactatttgcgtagactgaaagtatatcttcaagcacacaaaaatatgtttcagttaattagcacaaagtatttgtaatgaatttacattggaaaaatctgacacataccatctaaaccaagtgattaaggctagcatctccaataacaggacacgtcactatgtgcttctccatcttacgcactgggaacacaggtggtactgttgccaaacaattatcacctgaatttaacactaggaaacatacatagagtgatacagatagagacacagataaggatacagatatagacagatgtgtatacacacatatatttatcaagatagagaattaattaatgaatgatacgacaaatgtaaaatgttagcagttaaggaatccaggtaaagtctataccagaatagacttacagatttctgctttattcagtgagttataatatgttataatcatttatttcagtgatcaaattctccaggattttgcccacatccttctaatatatgcccaccactcttggaaaacttccttactttctagtataagatgttcttttgaaattactttaaaataaaaagttttttaaaactaaagttagtaaactaggattaagattttaatcctcttgtgaaaattgagaggcacaggagtattgaaaatacaagtgttagcctaaatagacatccccaaggtgatacccacaggcagcagcacaatggtgtagtggccagtggagctttgtgtacagactgacttggtgttaccccgtgacgagtgttgccagttacaccaagctccacctgtcacgacaccattacaagaggtaaatacgtttgaatgcgacatccatttcattaccgttacagtgtttaatggtgaacattacaagaaggcaggttttagtttaacagaaagtgaaacttcctagatctctccacaaaaagaatgggcagccaagtatgaaataagttcctttgattggagagaagctactgggttgggttataaaaagaattcaggattgcaagatgatttgagtcagccggtttctaaggtttttttttttttttccttaaccctgattgtctattatctagtataaaagggatgtaaaatagccccctcctcccaattttaggacagtatttgaatgtgacatcctaactcaaactccacaaaaaataaattaggtaaaaagacttgaaaaggggaagatacgaggactgaaaaatgaaccagtgtttagaaaaggcagttttcatatgataaagacttgcctaaacgacgacaaggcccttttttcttcttttttctagttccacttaggatagaccaagagaatacactaaattacaaaaagaaatattttaattaaatgtaaggaacaactgtctgactagaaaactatgaaacatggaaaaaattcaaaagaatgttgtagaatttccttttggagagttttaaaaactaagcatgaatccccatcacttagcacccctccccaacctcaccatacttgtcaatattatacccatttggcacagatcatctcataattagccatatggaatatatatgaatatgagacatgtatgacctgtatgttaaatgattgaatactttcaaaagtgcagttttcctttttaaaacctttgtcgcccaggaattttagataaagccgatgttttgggttctaaaattgagcctttgagccaggtacagtggctcacgcctgtaatcccagcactttgggaggctgaggcgggtggatcacctgagatcaggagttcgagaccagtctggccaacttgggaaaatcccatctctactaaaaatacaaaaattaaccgggtgtgatggcgggcacctaaaatcccagctacttgggaggctgaggcaggagaattgcttgaacctgggaggcagaggttgcagtgagctgagatcgcaccactgcacttcagcctgggcgacaagagcgaaactccatctcaaaaaataataataataataaaataaaattgagcctttgtagcaatgggtggttgttttaagccttaataaagaaatgtgttttaattccagatattaaccaaaaggcatttaacatattttgctaaaactacccccaattcagcaggcataaagacgtaaaacactaaacttaagagaacaaaatggtaaattggactttatgaaactttaaacttctgttcgtcaacactgggaaaaaatattcacttaatactacatacacacacacaaacacatacacaacaaagtacttgtattgagaagatattttaaaagtcagtaacaaaagatatttaatagatatttagtatctattagatacgtaaaacaacgtaagtttttaaatgggcagaagacttgaacggacgctccaaatacgcaaagtgagcacatgaataaatgtttatgcaaacgaaagccacaaagagatagtactagagtatcactaaaacagctaaaattaacaaaactgacagcaccacatgttggtgcagatatggagcagctcgaactctgatacattttggtaagagggtaaaatggcatagtattttagaaaactgataagcagtttcttatagatgtacatctatcccgtaacccaggaatcctcttcttactcgaaagaaacgaaagcgtacgtccacagaaagacttgtacaagagtgttcatagcagctttattggaaaaagtccaaaagtgaaacaacccaaatgtccattaacaggagaacaggtatttttaaatgatcatataccatgtaatggaatgctacgcagcaataaaaaagagtgaactaatacaaacaactgaatcttcgaaaacactatgtgaagcaaaaaaagccagacacacacacacaaaatgtactaaatgtgttactccatttatttgacattcaggaacagaataaattatggtggtaaaaattagaacggtgattacttacaggaattgactgaaagaggatgaaatagaaccttcggggtaatgaaaatgtcctatgttttgactgaggagatggccatgtgggtagataaattcatcaaaattcattaaattgtacacttaaagatctgtgcattttgttatatggcagtgttttgaaaacaatactccacctccagtctcctttggaacggtttgaagtagtacgaccgataggcagattctgctaaacagctaaaaatagaaattttccgtagagtccagatttctttttttttccagcatgaatgccagcctccatcagaggctgagccgcagcggaatgagctctcgtcagccagccccctcggtgggtcattgagctccggattccaggtccctttcccagcacttagtcccatttttaactctcaagaagtattgttccaaaacttggctcagacctgtcctctccttggatttctccgtttgttttctcagtgttgctcacccactctttgacgtgcacccctcgtttttcaaagcggtggattagggggtgttaatgctggggcagtgtcagtcacagaacctcgaagtcatctccctccctcagggaccgcgtcggtcatcagtcgcagacacgacagttcattcttccctcctgaacgcgcctgcacagatgggcgcatcgcacacgtagccaaatggatgtagctgttggggggcagggcctgaggggcagcagggagagaaaagaagaaagaaaggaaaaagaatggttctttgtagggcagcgaactgtcttgtgcctcccagcctgaatgtttccgatctggtttgctgctttttgtgatgtttgaacttgtttcctccgttcagatgctgaactcttgtccgaaaaacctcagggcagcagagagtgagggactgtgggaggcatgtccagcaacccagcgacaagaattgcagaaccgtgaagataaatgtgtgtccatatcaggactgggctggagaacgggaagagaggggttgcggggctgagactgagcgtgcgtgtgtgtgtgtgtgtgtgtgtgtgtgtgtgtgtgtgtgtgtgtgtcttgacaaactgatgagaaacactttagagtaattttctcctctccgctctcatacagtctggcactttctccttcctgtgacagctgccattaaccttttaatgcgaagacaagggtatcttgccaattggatgttgaaatctctggcaaggaaaagcttgctttaaaaaaagaaaaaggagggggtaatgtggggaaggctgggcagacacaccaaaggtccaggggaagacagggtactaagctggaccttaggatgcaaaatggctgccttccttctgataatatcccctcaacgaagttggggaaggaaagaggaaatggggatgtgagtatgagggagataaggaactcttttacatagttggaattacacagatattaaatattatttgcagttcactcccaatagatgtgagaactcctcatggagttttggtgtatatgtgggaccttgtgctaaatgttgaataatcttgtttgtgcagaaagagaaagaaagagaaaatattaggagacctctgtagaccaaagtgttatgatacaaaagatcgttccagccatttccttccatagcttatctcagagaaggggagttccagcgttcgcggctcgcctaccaggtcttccctccacctctaaactagggcagctcttgatcctggttactggtacctaccccagactcaccaggtctaaataaaactgaacataaaaaacatcctcttgggaattcagttctccgtaccttcagctttgcagcaaagaatgcagaagacttttcttttttttttttttttgagacggagtctcgctctgttgcccaggctggagtgcagtggccagatctcagctcactgcaacctccgcctcctgagttcaagcaattcagcgattctcctgcctcagcctcccgagtagctgggactacgggtgtgcaccacgacgccctgctcgtttttatatttttggtaagagacagggtttcaccgtgttagccagggtggtctcgatctcttgacctcatgatctgcccacctcacctcccaaagtgctgggattacaggcgtgagctaccgcacatggccacagaagccttttttaatctagtttttattagcttggcctcacactggactctaagagagtcctaaaatacgaatatggaatattttataaaatacaaagctctgcatttatggagatcttcgcgttttttaggtgccctaattgcttttttcctttgtgtcgaaggtattcccatgggagaagaaagttcaccccccgggtccctgagcccccgcaggaacaattatttaccatcctggaattttcatgagtcttgacaattactagaatccaggacattgaacacgggtctggtgtcaccagtgttatcttccagagacaatgctcccccaactaagcagagaagaaaatgagtccttgcacatgccagagaaacgtgaacgtgacctgcagaggcactgcaaacccaaagccagcgggcctagaaacctaggaaatgagttttccggtccgttcagagcatctgaaataaattgcccacagttttcttccagacttttagattctttacaaaaggtttggtggtactaatcttactgagacagcctagaaatacaagtaacttaaagagtgtctacaaaggggcatgccagaggcactcagcccacctgaaggatgtgaagttcctgtaggaacagtagctatgtacaacagtgatctctagacaaccaatgtaaatttaaacaaaaaggtgtggggccgcaccctctcccagtagggcataactgcccggatgtaaaatcagacgggaaccctgaaatatgaaccctctccagtttacagacagacgttgctgccattctccacttgactcccctgtgcccatgcctgaaagccccgcttccctagagagctgggggcagtgctgccacagcctctcttcccgcagtgccacctggtcccaaaagccgcagccctccacagcagcactagtgaggcctccttgctgttgtcgctgttactccccgagccttctggagaatctcctgcatgccttgtgagaacgtcctgatgctggggccactgccacagtagtggggttttctcccaatgcggttttcttctggtgccaagtaggaaagatgggaccaggctaactctgttgccagtgggacaggacatattcctgatgtctggagttagaactcagaaggtgccttccagtgtataaactgttaggaaatggttatttcctgtggcactgcacactgacaatactacattcgcttgctcgggccaccataacaaaataccacagactgcgtggcgtaagcaacagaaattgattttctcacagttctggaggctgcaagtccaagatcaaggggttggcagggctggtttctcctgaggcccctctgcttggtgtacacgtggctgcctgcttgctgtgtcctcacgtggtctgtcctctcttcctgcacaccgcggtgtctttctgtgtgtccagatttcctccttttatggagataccggtcatatcgcattaggaagcactgacctgcctcattttaaccgaatcgcctcttgagaggtcctgtctccacatgcagccacgtcattctgaggttctggtgatttcgacttccacctgtgaatgtggtggggacacagctcagcccatcacaaacattatgggtaaaataggcccatggcaacaacttccgaacctgactactacttgggtaacggttaagggtttcaaaataactgactgccaaactggctctggaaactgcattccaaataaactgcgggctctgcctgttaaagggtcgggggtcctggcgaatctgttacgtccactaattaccgaatactcccttaggggccactcggggctgctggttacttcagtaaagaatgctgtgtgaaaagcactgagtctctggccctttctaaaggagttgtgtaagagacgtaaagccataaaatatgaagtagatgcttgtttagcaagtgaatgaaatcaggaattttccagagataagattatggtattcttctacactgtataaatgctatcttactgctttgtttacctttttttatacaaaagaccacctaggcacaaaaggaagtgcccctacctagcatatgctgaacgggtgagagagagcctttaattttaacactaaagataacagagcttgctgtaaagtgcgatgatgcttaatagctctaaagatcaggttgtgattgatgggatttttcatggtgttcttgttaaagataaatagtagtttttaatgttatcagactggaaaaatcttactcttttctaatgtaaactgtaaaccacacttcagacactaacatcttattgccaacttaacagaaaagtgtgatgggatattggctaaggttccgacctgacttcatctctcctacctgcatgcctgaaatttcagtggttcgatttgttcctttgaattaggcatctttctgaggcactggctttgtaagtgcaagtttcctaggaagggcaacacgttgtcagtttctccttagcgtgcccagtgtatctgggatgataccaacggccagagactgggaaaaggagggttcaaaaaagggacccagtggccagattaaaagccagcttaacctcttcactgtatcccaggcctgatgattaagcatctttattcttaggattctccgactttaggctacctgatacatctagagcggcggtccccagcgttttcggcaccggggactggtttcatggaagacagtttttccacagacggggagcggcagggaagggatggtgtcgggacgattgaagcgcatgacatttattgtgcactttatttctgttattattgcgttgtaatatataatgaaataattatacagttcaccataatgtagaatcagtgggagccctgagcttgttttcctgcaactagactgtcccatctgggggtgatgggagacaggacagatcgtcaggcattagattctcataacgagcccccaacccagatcctctcacgcccagttcgcagcagggttttccctcctatgagaatctaatgccgcagctgatctgacaggaggcagagctcaggcagtaacgcacgcagtggagtgcggctggaaatgcagatgaagctttgcttcccggctaggccctcacctcctgctgtgtggcccagttcctaacagggcctggaccagtactcggagctgtacaccagtactgggagttggggactcccaatctagggtatatgagaaatcacatcaaccttttacaagggttgagcctaaatttgaatcaaaaaatacttatttctaaaagtaagtaagccacagatagatgtcagactacaactagcaagacagtaaggactcatggaaaagatggagtaatgagttttcttagcactgtgtgatacgacacagaaaagctgcagggggaagccttcacgaaagcaaaaaactccaactagaaatagcctgcaggggccaggtacagcagctcacgcctgtaatcccagcactttgggaggccaaggcaggtggatcacttgaggtcaagagttcaaggtcagcctggccaatgaggtgaaacccgtctctactgaaaatacaaaaattagccgggcattgtggtgcacacctgtagtcccagctactcgggaggctgaggcaggagaatcactagaacccaggaggtgaaggttgcagtgagctgagatcgtgccactgcactctagtctgggcggcagagcaagactccgtcaaaaaagaaagagagagagagaaggaaaggaaaggaggaagaaagaaaggaaagaaaggagaaaagagaggaaaggaaaagaaagaaagagcctgcaggctcagttagggatcactgttgtactgttatttcataaggcaaaccagggatgggctgtatttagccacagattattaaatctggaaagaatttagaaatcatctaatctcccctttattcacataatgaagctgaggacagaagggctcaagatggtaaagctaagtgacagagttagaactagacacatttcttccatttcagaccttttcccactgcttccctgtgcaacctcgggaagaaagccctcttagccggtccgaagcatctctggctgtgactgttcttcacgaatggtgactcctctgcaggacgccgcagggacatttgccttctagctcaagcagcgtatttccgtaacgcataacagcagatagatacatgtctgtgctaggtgtcgtgcactaacccagcactatggatgtcttggggggaggaaaaggaagagtagataactaagagtatcttactaagagtctcctgcagggctgtgactccacgcggctctcttgctccctgtcctgctggtggaagccttgagcgctgtctggtgtagcgccgtgcagcccgccagccgctgtcatacgggcattgggatcgttggaaagtgctgcgacttgggagtagctggggcagctgttgattgggagcagcctccacgggctgtgtgcagtgggtgattccaggcccctggcctgtgtggagctcactctctctctcggctcctttggaggggggcccaccgccctctccagctgtttccttaggaggagaggcaaagaagaaagacctggcattccttccagagggctgtggtgcggcttcgccttcccgccctgtgggaataaactctgtgaagtcatgtggggcctggagcgccatggctgcacccacactttctgggggaactgcgctcacaagtgtggtgagcctgaagcattcattgagcgagactggcctggaaatgtcccgggagtccctcattctcacccttcttcacctaagtaaacacacagcaaaattctctgagctttagggggctgtgggaatatttttctttcaaccccaaccttccccaagagctttcaaatcacatcacatactgtcttccctttagcaatccaaacttagtaacatgcagctccaggcccaaccccaccccaccccaccccatcctcctcaatgtcagctaaatcagacacaacttaccatatcattgtgctgtgccatgaactgggcagatacgcccggggtcactcagagcagcccgccagaccctagagctgtggcagccgtggaaccccttccatggcccttgtgagtcactgagccaggagtttgtatcacattaaagggtcctttcgtcatctcaccagggagtcaggagataccacccaaagaatgtatcagatttatgctaaaagaaaatccagcaagatccctagctctctgggaaccactccagcctctgcctgtcacagtggccctagaatcagacagcatgcgctggaaaaggcggagcgcagccctggacatagagggtgcgttgagcacgcgccactggctgtgggggaaacttccttctctcttcccgtctggccagagaggttggctggacatgggtcgggctttgtgctggtttagcacttcaatcttaactgcaacaaagccttgttcttaccgccctgacagtttcagcattaggtttcttattagttgtttgggtttgggggtttgtttgtttttttcttcatcttctcccttttgacacttttcatttcttagagccaaaccaaacacactaggcggactagcgaacctggcgtgtctgcagttcccagagccctgctgctgctctgatgggtccctttggcaaggagggaagtttttctccatttttataatgacgggcccttaatttgacggtctctgttcacttcagttaatagatttgtaagaaataatgtgagatattaccaaatcaactgagacaaccggattaaaattgtgcctcgctgggaaatctgcttctttgtttaggacaccccacactttctcaagcccacatcagcaaatctttggcctgataaaggcttccagagtccatctgtccatctcttgcttcaggactgtacttcatccaacctttccacgcagaagggtaactggcctgttatttgagtgggatgccatgtcacagttcctttggtgttccagggacatttctactcaagagatggtcccctgttttcttagtggatagaggctcatcagaccaatgcaaatctcctgttgagttttttttttttttaattcccatttttgtcttttacagtcatgttttctgttttcttgccaaactcctgttctgttcacctcccttcccagcttgttcagagaaggtataacacccacatcaagataaaacctgctgagcatggtggcacacacccgtagtcccagctgctcaggaggctgaggcaggagaatcgcttaaggccaagagttgaagacccacctgagcaacgtagtgagaccctttctctaaaaaattagaaagatctaacgtttcaggaaagaggataatctggaaagtggctgtaggcacagactatcgcatagaaaaaactgaaattatctcagccagggaagaatgctttaggcaggaagacagccagaattttagaagtgtctagacataagtaagttaggaattaagatgtgagtatgttggtgacgtctgcaaatacaaaatataatcatcagaaagcaaacgtttgtgctggtttttgtccagataacggtttaaaactgaatcattatatctattgtactacgtggttccagctcctgctgtacatgaggaggtgaatttggagtgacgggtgttagcaacatgtgtttcctggtcctatagactgccactgaccccaattcatttatccacctttgcttgggttacaattcatttatccacctttgcttgggttacttggtctctcagttgttgactttcacaaaataatggttgactctgaccttccaaagaataataagcaactgtgagtgatgcgacagctcggagaggtctgataactagcaagaccagattccttgtcgagctttcctctcaggcaggggagatttcctcttttcctccatggagagctcatgcacctggatgcagtagagcctgatcctctaaccactggccaggcttgagagaggcatattaagttttcctacaacaggtagatctatcagtctaacctgtgtacctggccctgtacctcttgagacctcagctgtcttacttgtaagggtagagaatggaactggtagttcttgtagctcccttctgagctgatgagtctaaatttcagaattggcctgttttgggtgtagcatttgtaggtctagttgttccattgttgggtatttgcctgagctgcaggtcggggacaggagacaggatagaaaactaaatgataatttatgtttttatataggttcactagaaatcttaatggtcttatttcttttagggctgggggcggccagtgccagttgcagtgttttcagtgccagttgcagtgttttcagtgccagttgcagtgttttcagtgccagttgcagtgttttcagtgccatagctgggaagcagagaagctcttgatttgtttttgttttgtttttaacctttgaaaatgaatggtagaaatacatgatgacttaacatttaaaaatctaggccaatcacagtggctccccactgtaatctaagcactttggaaagccaaggtgggaggattgcttgaggccaggagttcaagaccagtctgggcaacatagtgagacctcctctctacaaaaaacttttagaattagcgggatgaggtggcatgtcccagtagtcccagctactcgggaagctgaggtgggagaatcacttgaacccaggaggtagagattgcagtgagccatgatcataccactgcactccagcctaggcaacagagtgcaaccctgtctcaaaagaaaaaaaaagagaaaaggaagggagggagaaaggaaaggaaaaaaggaaggaagggaaggaaggaggaaggaagataaatctagctaccactaaggcatatggctagcattcactcaataaatatttaatgaacacttattacgtgccaggcataaagtgttgttgataatactagaaagtaatgacatacttgagattccctcccatccagggaatcccatcttctaaactgaggggaagaaaggaggaagtccctttatatcactgcttgaatctggaggagatgactgtggactatcaaatttttaagcagtagaattttgactttggatagacagacctgaatggaaccaaactcttgttgtttttttttgtttgtttttctgagacggagtctcactctgtcgcccaggatggagtgcagtggtgcgatctcagctcactgcaacctccacctcccaggttcaagcagttctgcctcagcttcctgagtagctaggtttacaggcatgcaccacaacgcccggctgatttctgtattttttttagtagaggcggggtttcaccatgttgatcaggctggtcttgaactcctgacctcgtgacctacccgcctcggcctcccaaagtgctgggattacaggtgtgagccactgcgcccggcccaaactcttgtttttattatgccattttgttcaaggttagttatgggagagcagtagcatcttatttacttttggtctaagcaacagcctttcttgcctgtaaaaacaaattcatacattgcctggcaaaggagttcatcacaaagtaggagggggagccgggtgtggtggtgcacacccgtagtaccagctactcaggggtctaaggcaggaagatcgcttgagcccaggagttccaggctgcagtggctgtaatctcgccactgcactccagcctgggggacagagtgagaccctatctcaaaaaataaaagtacggggagggaaaagaaggccccatagcaacctcacagtcattaccacttccagcccacttgcacacagtctgctgcaagtgcagacttgaaaggaatagaggactttggagttaaccataggataaattcttcaagagcaattttagttttccctggtactaagtgctaaagggattctgtagagtaaaaaagtgaccagatgcctgtagaaaaatagatgcctgggcagaaaatactgaggtttagagggattgcagatccctctaaccatgtaagttttatgtcttattcaatagatgctcttacggcaaaatacatttccatttattccagttgtgtgaaattccaaagtaggaagttactttatgtcttcatatctcctaagaagcctgcagattcaagctgggggcttgtgggccagacctggccaggacgagcaccgtttccacttgatctgtcagctccaaaaggctccgactgtcacgccagattacagctcagacctcacggccgacacatcctgggacttcactgttagaaccccaagtttagattcttgtctgcttaaaccaaactaggcatttctgaataatttcctgccctccaccaaaccatctgcagaaaggaattaatctgagtcactgccaaccacagcggaactcattcgctgacccctcttgtaaccgtcccttctttatacccatcagtacatcctccgtttcacctcatgctttgtgactatgaatagagttgtttaccttgaaatcaggccaagtctacagaacttttaactgtttttttctcttttacaaatctatttcacggagttctggtagctctctctaacatctttactagagagaaaatgtcatttctgttctaaaatcatgacctgcgccgagcggtaaatgtttggggcagtctccccgaatcaagcagccgacccctcaactcggcttctcttcctccattcagccacctcacattcctgattctttagactgtcagcttgttctctggcagttatcctaacactgaaagagggaagggggcctgagcgatttcccctgtagccagccgtaaccatgcttttgtctgccgtgtgcttggagagcctcatctctgaaatgttcccttcgtctgagcttcctctgtcggtgtcttcctgcgcagtggcaggggctgaggcgttctccccttccctctgctgataggcttccagcctgtgttgctttgagcattcagattgagttgctgttgcatttgtgattcttggctctagtccctctagaaatcatattactactctgagttcaaggagggctggaacagctactaagaacagaatgcattttaataacattcagcacacaaaagccagagaatttctgccagaggccccctctgtatcttatacttgtcccgtattccatctcttaagaactttaaacagagtggggtgctacaccgtatagtttatgtgccctgctgtctaccgaagggcctgtaacctcagactgttttggtttggacttgcttcaaatttgaacttacatagctctttagaacattatcaaggcctttccccagaattagtatctattcctttatttcatttaccagtcattttcagattgtctgctatgtgcaggccttttgttacaaggcaacattggtatacgaaaaagaattcaccaaggagcttgaagaacaattgaggaattaaacatataaccagctattggaaggggacaaaatgaatactgtagcagtttacacttctaactagggatgacattacagagaaaagggattcaaccgtgaatgataagaaagatagagaagacagatgtgtaggaaataagattgtccacattctagaatgagagaaaaggaaaagcagagacagggaatggccggtatgcaccaggagatgaagttggagcagtagctcccatgccaaaaacctttgtcttttattttgtaggaaggaaattgtttaagatattggaagaggaggagggaactgttccagcctatttgagaaagattctcttacaccagggttgaagtggttatgaagctattgcaagatggtagaacatgagagcttgaattaggatcgtaacaaggatatcagaaatgaaaaaaactaggctagatgtgatggctcacacctgtaatttcaacattatgggaggctgaagtgggaggattgcttaaggccaggagttgaagagcagcctgggcaacatagtgaaacttcatctcttaaaaaaaaaaaaaaaaaaaaaaaaaaaggccaggcgcggtggcgtacacctgtaatcctagcactttgggaggctgaggtgggcggatcacaaggtcaggagattgagaccatcctggctaacacagtgaaaccccctctctactaataatacaaaaaaaattagctgggcgtggtggcggcacctgtactcccagctactcaggaggctgaggcaggagaatggtatgaacctgggaggcagagcttgcagtgagccgagattgcgccactgcactccagcctgggcaacagagcaagactccgtctcaaagaaaaaaaaaaaaaaccttaaccaggcgtggtggcgctctcctgtagtcctagctactcgggaagctaatgtgggaggatcacttgaggccaggagttggaggctacagtgagctatgatcactccactgcactccagcctgggcaacagagccagactctttctcttcaaaagaaaaaaataaagaaaaaactaaattagaagaaacatgatctggaaagagcataataggaaactcacagaaaaagtggccaataaatatattttttaatgttttaccccaacttttgacttcactacagatggaaagaactacagatgaaaacagtgctgtcatattgggaaggttgggattggttcgttggtttgtgtccctagtatgttgagagagtgggaaaatgggcacctttatttcttgcttatgggctgagtattagtacagctattctagaatggtctggttacttgtcaaaaactgtacacagctctacaccctttgggactcaggaattttaagtaagaaatcatagacatgcaaagatttacatatgggaaaatataatacatcaatatttatagtaatgaaaacttgagaactaaatgtctattggagttagttaaataaattacaatatattaataaaatggattacaatgcagcccattataaattattttagaagaatattttatcacatgaaaagctgtttaattattaggtgaaaagaacaattcattaaatagtatgaacagtatgatttgatgtgtaaaggcagcattcaccaagggatgtttatcaggcactggaaagatgtgcgtctgaaactcagtagagaaagaagctacggttataactgtgtggatccaccttcatagtcgttatatttagatcaggacgtagaagagttattatgctagtttgttttgtatacgtgtgatattttctgtgatttaaaaaaattttaaaaaaaacacctacctcaaaataaataaatttgaaagaaagtggattaaatgtgttaatgccctaaagcacttagaataatacttggcccataataaatgcccagtaagttaggtgctgttattatcatccccccttttaaagctaaaggtaaacaaggttccctaagcagaggatctaagaggaagaacagtggacagtctccttagacctcaggaagcctctgcacgtgtgggactgaagcagagagaagaagaacagcaccaggacagggaagaaatgttggggcgggcagaggagaaccggaaacatgtgggtgttgggggcctctagggcagacagcctagcacgtgttttcgggtcagattggatcgtacagttagataatccttgggggtccttggtgggttttttttccttaagttttgaaatataacttgcatacagaaaagtacacaaatcatatgtatatagctgaattactcatagcaagttcttggaacaagcagcagaatgttatcagtgcctaaaagccccttgtcatcctccttccagtcactcctcctccaagggtaacctgacctcaaacaccacagattagttctgcctgtttgtaaactttctatgcctggaatcataccatatggactgtattgcctctgacttctgtcattcaacgtcgtgtttgtgaactgcatctgttttgttagacatacacttcgttcattctcattgctctatgatactctgctgtgtgaatgtgccacaaattatttatcatctgtttctcattcagtatggacattcgagttgttcccaggttttaatactcttatcagtgtcttcaggtgaatttacacacacctatgagtccacttgttcagccttggcattcagctttagtagatcctgccagctgttcttctaaagaggacgtgcccatttacactcccaccaggagtgtgggagaggtcaagtggttccacatccttgtcagcacttggtgttgtgtgtctttttaaatttcagccattctggtgggcatttagtggtatctccttgtgattttaacttgtattttcctgatggctaatgagttatccacctttttatatgtctgttaaccatttcagtatactcctgtgaagtggtcattcaaatgtcttgcctgtttttcattattaactgttgttactgctttataggagttatatattatggatatgcatacatgagatatgtatcttctatctgtggactgcccttttcactctcgtaatggtgtcttttaagagacagaaatctggccacgcgcggtggctcacacctgtaatcccagcactttgggaggctgaggtggctggatcatgaagtcaggagatcaagaccgtcctggctaacgtggtgaaaccccgtctctactaaaaatacaaaaaattagctgggcgtggtggcggcgcctgtagtcccagctactggggaggctgaggcaggagaatggcgtaaacccgggaggcggagcttgcagtgagccgagatcgcaccactgcactccagcctgggcgacagagcgagactccatctcaaaaaaaaaaaaagagacagaaatccttaattttaatgtagatccagtttatcaattttttctttttgtgattattgctttttgtgttctgtttaagaaatctttacattccctaaagatggtctcttacattttcttgtgaatgctttattgtttcacccttcacatttatatatgtattcatcatgaattgatttttgtgaatggtgtgaggtagatatccaaatttgttttgcatatagtgccaccatttatcagaaagaccatcctttccccattgcacagccaagtggccatatatgtgaagggtttttccatgttctctttttgtcccgttggtctgtgtgtctgctcctgtgccagtgttatgcatgttcattgctgccgctttgtcccgttggtctgtgtgtctgctcctgtgccagtgttatgcatgttcattgctgccgctttgtcccgttggtctgtgtgtctgctcctgtgccagtgttatgcatgttcattgctgccgccttgcagtgacagtcttcttccagagaggaacgttcgtgtagcttcattcttggtggccgtcttagctgttcttggctctgtgcatttccacttactctttggaatcagcccgtctattcacatacacacctgccagtgttgatttggcttgcatcgactgtagagattagttgaggcagaattcacacctttgcagaattgaggcttccaatccttaattgtgtttattcctccatttaagacatttttaatttctccagatattttatagtttcattagagaggatcttgtcatctttcaagagagcaatttcagtgaaatagcagaaactaaatttttagttactaaggagagaactcagaaatgcaggtaacacatgtagactattcttttgagaaatttggttacaggaagagaaaagtttctactaagcttgagagatggagattccgaaagtcttttcaggacgggcaggattcagtgccctcagaagccgtagtgaaagaccaggggaggggaggggttggaaacacagagttcattgaagggacagagacatggagagttagctcaagtgtgagcagggaacgctgccaccctggagaagccaggtggggtcattttgaggcaggacgggtccagcacacgttacctcggactccctgggtgctcacatagtcgacagcacagagccgtcgtgagccatgccctctgcactgagagcagcagcaagcccagctgcactcacgcctgtcttcacacccccgagcccctggaatacagcacatgctatgttaacagagcgtgtttcacgttttctctaccggaggtgcgtatttgtacatgtgtcattccaacggtcctttcctccagtgtatcttaaagtcaggtttggtggaaaggggctttttcacaaaatcttgcagtgcccgggaggcttgaggaacatttcgtagtagaaatgttatgatggaggagactaaggtgctgagataggagacttcatgcttaagttgtagaaagggctggcagaattcatgggaacaaacttgttttgcagttgagcgataattggtttactctggaagtgtgtttagatgttttgttattgtttgtgtttagatacaaagctttcagcacatgcacagaacatggcatctgcgtatctaggggactgatagggtgagcttacgtgctgcccatgattgtggtgttttcaataaagtcaacgagaagacaatgtgtttcaccgtaatacttgcagtggtgggattatttgccagtattagaaaatggagaatgggaaatggaaaatctcattggattactccttagatctactacgtttggatttgtagccttaacaagtcaataaaaggaaggggaaagaaggaatcaattcattgtaactagaatgtaatgagcactttcattaaatctcaatttaatttgtactctttgggaaattcttttctggttttaagccttaaggggcctgccttgaaggaggaggtgaggaagacaagcaggtgtgggaggtgtgggaggggacatgggtagcgggcagggagtcgaagagaacaagaatatctcgagcaatatctgttaggggaagtttcagacactaaaatacgtctttccctacttatccacagaatccattacatcccaaggccatgcaaaacctgcctcttttcatgtgatgcacatggcaaagcaatgcagatgccccttttactgtggggatatgttgcagagcccccagtggatgctgaaactgtagatggtactgaagcctgtagataccgttttctcctgtacatacatacccgagataaagtttagtttataaattaggtacagtcagagattaataataaactaggacagttataacaatactcagaacagcatgcactgtaaaacttatgaattgtttatttctggaattttccatttaatatttccagatcacagttgactgagggtaattgaaaccatggaaagggaaaccacagacaagggggcgctgccgtatttgagtataatgaggtgctagtccatttctggttttgttttcacacctgtgccgtataacacattcatctaagtttttagtttgatttcttcacattgcctatctttcctaagcaatctaaaagctttaacaacacatgcctgtacccctttgacttcagaatgactaaaactttacaatcaaagtcaacaaaataaaaatcacattttaaaagtaatcacagttacacaagagaagttgatcattgagattctttcaagccaagaaaaaacagaatggatcaagtaccagtgaaatctctccctgctcagctgtgcccacatgtaatactgctttcagatcaaacgtgaaccatgcctagtccctggagaacagcgaaaggcctcccagatggaaagcaactccagccagtgaaggaacacttccttctctaaacttttcgattctgtgattccctctatttttaaacaccttttcccaggcatagcatacattagaccctgggaaaagcgtagctttatagtctgcctctattttttttttcaccttaatcttattccaccgcttcttgttatacttcctcctccagtgctaaatcactcgtcccccttcttgtttacaccctcctggcatttgtaggtaataatcacatttccctgcccttcgtttttacgtagttcaggtctacatgtttagtttttctaatcctgcctcataaaatgattcttgcagcttcttagtcatgctgccatttttctttgaactcactccagtttgtctccatttttctggtaatgaggtgtctgaaacggaacacagtgcccttaggtgtggcctcgccgaaactgtgtcatggaatgggggtctgctcaggagtgatgcccgtgtctggccagcccagaggccttttgtctctcttgaagagctggaattgcttccatcaagagccagtgactccagaactgcagtgagcagcccagtgcctttcctcctctgtgcctcacctcctactgtgtttccatttgaaatgacccttttctgtcccctgctgccaagaaaatacccaccccccatccatccctgccttcctttctgtccagactgaaagcagtagcattttatctctacctctttgtggcagttactacacagtgtttcgcatagagcactcagtcaattttttaaaagagttttttgttgtttttgtttttgtttttttgagacggagtctcgctcttgtcacccaggctggagtgcagtggcgcgatctcggctcactgcaagctccgcctcccaggttcaagttattctcctgcctcagcctcctgagtagctgggattacaggcacctgccaccactccagctaattttttatatttttggtagatggggtttcaccgtgttgggcaggctggtctcgaactcctgatctcaagtaatctgcccacctcagcctcccatagtgctgggattacaggcgtgagccactgtgcccagccaatttttttatagttttattgagatataatttacatacatacaactcacccattgcaagtacataattcagtagatatagtgtgttctcagagttgtgcagccatcaccatagtcaattttcgaacatttttgtcacccctaaaggaaacccccacccattagcagtcactgccaatcaccccatcgtaccccagcctcacgcagctgctactcttacttcccaactctgaattcggctactctggaattttattaagaatggaatcaggctgggcatggtgtctcacgcctgtaatcccagcactttgggagaccaaggtggacagatcgcttgagcccaggagttcgagtccagcctgggcaacgtggcaaaaccccatctctacaaaaaaatacaaaatttagccaggtgtagtggcatgcacatatagtcccagctacttgggagtctaacgcaggaggatcacttgagtctgggaggtggaggttgcagtgagctgagattctgccactgcactccagcctgagcaacagaatgagaccctgtctcaaaactaaaaaaagaatagaatcatacaatatgtggtcttttgagaccggcttctttcatttagcgtcatgtttttacatactttacatagtgtagctttacataatgtaacatgtcagaacttcgttcctttttattggccagtcggttaatactttttgagtagatattttatacacttcaatttttacctccttaaggttgtagagtatcagaattatgcctttaaaagtatatacagttttaaagggtgtttattatttatgttacatattttcgtatattattgcaaagttgatattgcttgtgctataaacaacactgaagtatgtaaagtaaaattgaaactccttccatccactgaggcctttttttttttttttttttgacacagagtctctgctctgtcacccaggctggggtgcagtggcgtgatctcacctctgcagcctctccctccggggttcaagcttttttgtgcctcagcctcctgagtagctgggactacaggtgctgccaccacacgtgactgattttttttgcatttttagtagagatggggtttcactatgttggccaggctggcctcaaactcctgacctcaagtgatccgcctgcctcggcctcccaaagttctgggattacaggcgtgagctaccacgcccggcctcactgaggtctttaaaaactctttgtcccaactgggcgtggtggctcacgcctgtaatctcagcacttttggaggctgaggcaggcggatcacaaggtcaggagatgaagaccatcctggctaacacagtgaaaccctgtctctactaaaaatataaaaaattagccgggcatggtggtggtgggcacctgtagtcccagctacttgggaggcagaggcaggaggatggtgtgaacctgggatgtggagcttgctgtgagccgagactgcgccactgcactccagcctgggtgacagagcaagactctgtctcaaaaaaaaaaaaaagaagaaaaaaaaaaattctttgttcccacaaattgccttagtaaacatactggtacatagattcttaaatttcttactggtgtttctattgaatgtactctaaaactagaattatttggtcaaaggaaatatataattaaatttggctgatgagaccaaatttctcccctgcctacagttgtcccacaggtcattgcttcagtgttcccacttcccatgccctaatcaactctgattgtcagtgacctcgaaatgtctgccagtgtgatcggggaaaaacataaacctatcttgtgtagtttatatttcttgtttgttttgagttttccttttcctttttttttttttttttttttttgagacagagtctcgctctgttgcccaggctggagtgcagtggtgcaatcttggctcactgcaagctccgcctcctgggttcaagcaattctcctgcctcagcctcccgagtagctgggactacaggcacccaccaccatgcccagctaattttttgtatttttttagtagagatggggtttccctatgctgatcaggctggtcttgaactcctgacctcgtgatccgcccgcctcagcctcccaaagtgctgggattacaggcatgagtcaccgcgctgggtcttgttctttttttgagacagggtctcgctgtgttgcccaggctagagtgcagcgataccatcatatagctcattgcagcctcaacctcctgagctcaagagttcctcccacctcagcttccagagtggcaagaactacaggcacgcacaaccacacctgaccaattttttcattttaatttttggtagagacgggatctctctatcttgcccaggctggtcttgatctcctgggctcaagtgatctgcctgcctcagcctcccaaagtgctgggattacaggtgtgagtccccacacctggtcaatatttctgtttttttttgttttttttttttttttgtcacccaggctggagtgcagtggcgtgatcctggcccactgcaacctccacctcctggattcaagcagtacttctgcctctgccacccaagtagctgggattataggcacccgccaccacgcccagctaatttttgtatttttagtagagacagagtttcaccatattggccaggctggtcttgaactcctgacctcgtgatctgcccaccttggcctcctaaagtgctgggattacaggcgtgagccactgcgtctggccatttaattattaatgaagttgggtattatttttgtgcttgttagccatttgtatttcttctgtgagttttttgttcatatcctctgcctgtgtttctattaggttataggtttttaggcttatggtagcacttcgtaatacactgatatcaatcctttgtctttttgttttgtatttattatgtttttcaagccatcatttgtactttaattaaatttatagctcttctgtctccatagacattttaaatttctaaatagtccaacttgcccttttattcctttatgacttctgaatttaaaagcacttaccctcctccccaaaataaagctaaaaatacttttctgtctcccatcccaagattataaaaaatatgctcttaagtttactttcagtattttcacagcataggttttaaatgtgcatctttagccagtttggaatttgtgttgctgtatggtgcgagccagaatacaaccgtaagtggacccagttgacccagtgcagttcattgacttcatatgctcctggtcatatcctaaatcccactcatttgatggtatcaacccaatactcttctaattattacacttttatagcatgttttatttggtaaagcaagtcttaaaagcactcttctttctttaaaatattgtcttgactcttctctatatttatacttcaggataaatgttagaatccattatcaaattccaaaaagaacctttaggatttgtttggaaatgtatcatacacacaaatacagacaaaaataaagcctcaaataaggcatttttaaaatatatagcagtggttatctctagatgatggtaatattctgggtgatttttttcttgtttttttttctttattttccaaagtttttacagtatttgtgaagcattttttattttattttattttattttatttttgagatagagtctcgctctgtcgcccagactggaatacagtggcacgatctcagctcgctgcaacctccgcttcctgggttcaagcgattctcctgccttagcctcccgagtagctgggactacaggtgcccgccaccacgcccggctaatttttgtatttttagtagagacggggtttcaccatgttggccaggctggtctcgaactcctgacctcaagtgatccgcccgcctctgcctcccaaagtgctgggattacaggcgtgagccaccgcccccggctggaataaagactatttcatggaaataaataagtgacttgtagagagtaaagaagagatacctggctcagaatataaactagaattgtctggaatattcctgggaaggatcaagctggaatcgagctactgaagcaacaccaccccacaacctcttctgtagcttggttgatgtcagttctgctgagactttaaagtttgcagccttttcacttcgcagcatttctggggtgttttctatgcagctgtatttacaaggtacccagcctcccagctctccctgttcttcctactcctgtggcacagccagagcttgagatacatcgaggcagtgtcgtctaaatctggcccctcagtgtcctggtctgttagtcaccgttcagcagaaagaagattgctaggtctattcttaactctgatatatttaagaaacactgtgctaatccttgactcagagcatctggattctttttttcttttcttttctttttttcttgccctgtcttatggtgccaaacatctagatttttttttttttttttttttgcttgttttaagatggaatctcagctgggtgtggtggctcacacctgtaatctcaacattttgggaggccaaggcaggagggtcacttgaggccaggggttcaagaccagcctgggcaacatagttagaccccgcctctaaaaaaaaaaaaagaaaagaaaaaagaaatacaaaaattagccaggcatggtggtacatatctgtaatgccagctacttaagaggctgcagcaggaggatcacaggagctcaggaggtcgaggccacagcgagcctgatcaaaccattgcactccagcctggacaaccgaggtagaccctgtctcaaattaatagagagagagagagagagagaagaagggagagagggaaggagggaggaagggaggaaggaaggaaagaaggaaagaaaaagaaagaaaagaaaggaaaggaaagagagaaagaggctcacgcctataatcccagcactgggaggccgaggcgggcggatcacgaggtcaagagatggagaccatcctggctaacacagtgaaaccccatctctactaaaaatacaaaaaattagccgggcatggtggcaggtgcctgtagtcccagctactcaggaggctgaggcaggagaatggcgtgaactcaggaggtggaggttgcagtgagctgagattgcgccactgcactccagcctaggcgacagagcgagactctgtctcaaaaaagaaaaaaaaaaaaagaaaagagagagaaagaaaagaaagatagatggggtctcactatgttgcccaggctggactcaaactcctgggctcaaacgattcccacaccttcagcctccaaagtagctgggattacaggcatgcaccgctgtatctagctccctttttgctttttaatctatatgctcttgctgggtgatcttatccatttaataacagaacacctaatatttgtcaggcattttctatttgttaggcattacactgcactttatatgactatctcattaaatccttaaaacagccgtataaggtagggcaccggagctcacttctgtaatctcagcactttgggaggctgaggcagaggcaggaggattacttgagcccaggcattcaagacaagcgtaggcaacatagactcccatctctccaaaaaattaaacttgaagacattggcctgacatggttattattgcctcattttacagatgaggaaactgagactcagagaagtcaagatcaggtaactcattggcagaactggccttgaaacccaggcagcctaactccagagcctgtgttcttaactacactttacacgccatttttaattttcctcctttctttcctaaaacctgctctgcctcctacattttcagtcttgtttgtccaatatccccagctagaactgtcagaaatgattctccagttccccctcagttaacgcctcctccttttagtcctgcctttgaagatgctcagacctgtgtgttcctttccccgtcgctgaccctcccttgcatcagccctgcctaaccccgacctgggctgggcgcaggagctgcccttggtgggctcttccttctgctcagtctaagaaggtgaagatgcttatgtcactgtaccatttaaaagttcgtggacttccttttttgtggttttggttttggtctggtttttaagcagatcacactggaactccctcactccacatgctcagtccggccctcgcctgtgttttcagctccgtttcctgtcattctccacccactccctgtgccttacattcctgccatcctgaggcttccctcttcgcaagatctgggccaggcctgtcctagctccacgcatcagcctttgttcttttgctctacgcctcctctgtctttgatctcccagacagactctagtcagctctcaagatccagaccccatgcctctttcggagcgtttcctcagattcctcccgggtgaggcagtcactcttcgggctgccacagcacatgctccggcctcagctgtggcctcactctgctgggtggtcgtttatctgtttacgtgcttgtctccattaacctaaatgggtctttaggacaaggaccaaatcccttcagctttcagcgccgagcacagagtagcgctcaataaatgttggttaaaacgcttgaaggaatgggaaagaggctgttaaaaacaacaggaagttagaaatatacttacttctaagcaaagggattatcttgtgtttctcagagtaatctcttcagctaaatcagcaggcctcaggttgggcaggctaatgtaccgaatgaaagtgacacacggcaaatggagaagtcctttaaattataagttcccttagggcaaaggtcactccacaaggttgagatcctatctgagatcaccatgcccctctctcgcactctcacgcaggttcatgagcctgtggcttcgtggagagaacattctgtttagagtgagaggccagggctgaagccacagctctgcaaaaataatcatcagctttgggcctagaaccagtgactttttgggcctcactttcatgaagacacatttgatacttacttttacacttttctgatggttaattttgaggcagagagacttcacatagaaagtgccttttttgtcatgtattgatgaaaaataattcttagctcagtgcacatgagattgttgtatctgaaatccgtctctcctttccctttcagcttcaggatgagttagagaaaggtgaacgggacaatgcagaactgcaggagtttgccaacgccattcttcagcagatagcagaccactgtcccgacatcctagagcaagtggtcaacgccctggaagagtcctcttgaccctgctttgtggggaagcctgaggtagtcaacccaggagccaagaaaggagaactacaaggcacaggcgcccggaaccttcttggcacccaacactacaaacttcctcccatcttgctcacttgaagaagcgtgattccagcaccgtttctacatctgccgtctttctctgccttcctgctttggatgtggtctctacactaaccttcttgatgtccagggtagataaaaggtcgaatctctctgaagaactgtgacctggtcgtcaacagtgactgtggaagctggtggctcggccctgacagagggccatggagcagaggagcctctcatctcctgtcctctgacatgagaatgaaaccaggaatgtacttggagttcagcgggctgagaggatgcctccagtggaccagagagctgagtgttctaatgtcacaataggtgctttctcctaaaagggtaaaaaacaatctcaaaaagatgagaaaaagaaaagggggaagggaagagaaaatcgactcttcttttcactgtctcttctgcttactttccacatgagatgctttataccggggagctgtgagcaggcctcacgatggcttgggagcactcgtcccccagggtgtgagtcttcacccagccctgactgtctgtcccagccttcattactctggtcctcggccagtttacaagaagatggtgtgaggtgttctccaccagtctctcctgtttgagactgttgaccatatcatacaattagatcaaatgtctctaactgaaggagaacatatgaggttgaaagagcaccatccagggcaacatagcgagaccctgtctctacaaaaaattaaaaagagaacatacaaagttgacatacgaggccctgttgtccccacctgcagctttgccccagtagcagatgcccgtgcctcggggttgggctgctttcccctgaacacctccaggaggctgcctgccttcccagcacccgtgtcccgagctcctgcagcccagtggctgctgaggttttgatccctcactcaccctgctagctttgccctagactcatcctctcagaacctcagcctcatgcattgcctggaaccttcttctggcataaatgaaggtttcttgtcctatacacattccttccttgattatttcattcagagaatgtttatgaaatgcctactgtgtgcaagtcatccatccttgaaaaggccacttctcagtaagggagaggtgcagtggattctgtgagacataccagctgaagtcgaagcagtaaatagcgtgtccttcccctccccgatcttaaggtatgttttctacaaaagttccctaatggaattcgtgagtttggggggctcagtcacccactcgcctatgggattccatttgatgattctggatttttgctgtttgttgttgcccttagagggctctgagtatctacttgtgggtggccatttgctgacatctgcatgtaccttgtggaattcagccagcctcatgttgcaaatcagagagctgaccccaagactgcaaatccagttgaaggtattggcattgttaaggacattttcccaagcgtagacaacagactcgtaaataattgggcatgaagaagtaaaccacttaacccaaatctagttctttgaccatctttacccccagagcccagcagacactcacatctcctgataatgtgctggactcactgtttttgttttgcattttctcctctccttccccactcactctgagaatttaaagtctgtagagtcagcacagccccatcagtccaggaacttcccaccaccagcccctgactgtcccattaactgatacggtcagatctccagctccccttattccctgctgtaaaacagtccctctccccgtgagaggaaactgtggagtgtttcttatcgaaggtctaaatggactctgctcataaacctcttactgagatgcttcctgatcgccaggctggccagagagggctgcaggggttagatagtaagtggtggtcctttgtggtcagttcctcagttctgtttattgcagtgcccataaaccatgtagcaagctcccagtactgaaagccaggagtattagaatctcactttatccaccataatgtaaagacctggggtatgatcacagccttcacagggccacagtggaaccaagaaagcaggcgaggccatgcctacacaagtggcctggcactggcactggccagctgctctctcactggtctatccaggaaggcatcaagcaggtaccccagatccacccacgtggcctttctcatcaggtgcagcacctgccactctcagccactgggtgtgtgacgctcctcttcatctcaatgttctccatcacttcccctccggaacaactgatggaaggaggccctctgtgacagtgcttctgagaagaaaaatttctgggacagatatcatctgtctggtctctatgaacagcaaggaatcttgacccttgggactgttctggcatctcagatgatgtggagactggctaagagttcaggaataaatatggcctgcctttgtgctgtagggcagagtggatgcagtttgtagcactcagagtatctcattgagtccaaatcattgaaccaacacttaaccaaatgtcccactcccatcacactaggacttgtcattccatgccctctcctagtagtcatggtttcatatggccatgcaactgctactgaagttatatagccttgaaaactcaatgcaggttgcccttaattttccccaagcccctccatcggcaagtctaagttgccctttagcacctaaagatccgcacctcacatcagtgtcaccataaagagggcaagaagaaaagcaggtgtgatcccagcggggttttgtaactgaagaagtacagtatgagtgtctcatgtcttcatatacctctaacccccggtactcattgaatcattgatgaggtatctcagttgagatttgcaaggactttgataccatttgaaatggaaaagattttgaacaggctttaacatatttaagaaatatggatggggccggccacggtggctcatacctgtaatcccagcactttgggaggctgaggcaggtggatcacctgagatcaggagttcgagaccagcctggccaggatggcaaaaaccccgactctactaaaaatacaaaattagccaggcgtgatggtgcacgcctgtaatcccagctactcaggaggcaggagaatcgcttgagcctgggaggcagaggcttggtgagccgagattgcatcactgcactccagtctgggtgacagagcccccgtttaaaaatatatatatatatggatgggaatcgccaaattcatctcagctctcaccttttaacctttgtccttgcactttataatctaaagaagatctacctgtggctctcggacttcctcatacttgggttttagaaataacttgtaaagcagactggacccaaggccgccttcagtgttgagaggggcatgtgacttgccactttctgtcaattgaagtctggttgtccatgaggaacttgtggactcacccacccccagagtgagagaagaggaaggcaacgtcatcacagacacggtcttagccacctgctgaactaatccctcccctgtgagggtcagggttgtgaggaaaccgtcatgtatcacccgaaatataaatgtttctgagcagcccgtccactggcatttggatttgccgccagagtcctgttcctcctaggaccgtaccgccctcctgttgaccgtgttacttgagtgtcggcctggtggctaccctcagagtctttgaggaaagagccaagcaaggaagacctcgctgcgtggagtatggcaccacgtggcatttctcaagcccagcggaccccgtgtcagcaaataccagtaactgaacatcagtacccagcctcatcttcacctgcctgggttcggaactgaggaggaaggatgagaagagaccacagtgccgcagacgccctccgcagagcaaggccgcccatccatcactgccagccctgggcttctcaggaggggacgtgaaccactcaaaggaatgtcttaaagagaatctggagtttcccccatgcgaattagggaataattaggcaagaaaagacatacattacagggaaatccttctgaacaaaatggctgtctttacctactctttttaagcaaaaactgtctccagactttttagtgtcaaaactgtaaccacctgtcttctgatttttcccaatgtgtttggcaagtgctgtgaccctgttgtaggcacttctcctgactctgggggggaagtggttttagggattgattcgggggagcgggtttttgtcccatcccacctcccctcctctttctctgcttgtcgatatcgtctgtgtgattcagagaattggggcagttacattgtgtctgttgagattattaaaagattaaaacgtagttgtagaatgaaaaagagctgtgttttaaacatgcaaaccaatatcttgttaataaaggaattcaagctacagggcagccacgctcccccctcccaagctggcataggtggccccgggctggcagcttaggaagcgtggagcacacttagggtagtgcccgcctgggtgagagacacctgccgagcaaaaggaacgagaatctagggctcagagctgcgcagttgtgccaggattttcctatacacgctcaggacctctgggtaaaggtttcacagtttgtgaccccataaccaccctcaccccacgtgggtcctagctcagtgtgcctaatactgcatggtgacctgggcttgaccctgcagccctgcccggcaggccacaggacctctcctgcccaatggtgctatctcatccagtgaccgcccagcacgggtgagcactggccagcctggagctcgcagtccaggtggaacagaccgtattccatgtcagttccttctggcttcgggcctcaattctttccctttgagcttttttagaccccagatctcctaggcccaggctgtctctgttggccccagagaagccactgtcaagaaaggaagtgaaccctactgaagccagagaatccaccccggccaaagcaagccctctgggtccagcccctctttccacaccatgccagtattgcatccatctactgcagctacacatcctgagggcagcaccacccactctggcctgctggcccatggcaggactagcccgggcaccttccgggcactgcaggatgtccagtggggcctgtgacttgctccctgtggcatcggaaggaagtgttgcactttactggaggagcacctgcccccttgtagcttgagttccttttggtaacagtagcagcctccatggtggtgtctgatgcaaacgcacccgctgccttcaactgtatgtgtgtgttcctgctggagttgtgttactgacaggataatgacattacaaagaaattgtgttatattcaactttgccttgataattattgtaaacactttgttcattttttcttttttattcacaaactaaatccaccaggaaattataaagttatttaaaaac

SEQ ID NO: 14 - DNA, 1024 bp, Artificial sequence
  Target site sequence
atatacaaagatacagatagaaatgatttgtaatatgataaaagtcgatatacaaagatacagatagaaatgatttgtaatatgacaaaagtcaatatacaaagatacagatagaaatgatttgtaatatgacaagtcgatatacagagatacagatagaaatgatttgtaatatgacaaaagtcgatatacagagatacatatagaaatgatttgtaatatgacaaaagtcgattacagagatacatatagaaatgatttgtaatatgacaagtcgatatacagagatacagatagaaatgatttgtaatatgacaaaagtcgatatacagagatacagatagaaatgatttgtaataagacaaaagtcgatatacagagatacagatagaaatgatttgtaatacgacaagtcgatatacagagatacagatagaaatgatttgtaatatgacaaaagtcgatatacagagatacagatagaatgatttgtaatatgacaaaagtcgatatacagagatacagatagaaatgatttgtaatatgacaaaagtcgatatacagagatacagatagaaatgatttgtaatatgacaaaagtcgatatacagagatacagatagaaatgatttgtaatatgacaaaagtcgatatacagagatacagatagaaatgatttgtaatatgacaaaagtcgatatacagagatacagatagaaatgatttgtaatatgacaaaagtcgatatacagagatacagatagaaatgatttgtaatatgacaaaagtcgatatacagagatacagatagaaatgatttgtaatatgacaaaagtcgatatacagagatatagacagaaatgatttgtaatatgacaaaagtcgatatacagagatacagatagaaatgatttgtaatatgacaaaagtcgatatacagagatacagatagaaatgatttgtaatatgacaaaagtcgatatacagagatacagatagaaatgatttgtaatatgacaaaagt

SEQ ID NO: 15 - DNA, 14 bp, Artificial sequence
  Oligonucleotide motif
tcatttctatctgt

SEQ ID NO: 16 - DNA, 20 bp, Artificial sequence
  Oligonucleotide motif
aatcatttctatctgtatct

SEQ ID NO: 17 - DNA, 18 bp, Artificial sequence
  Oligonucleotide motif
tcatttctatctgtatct

SEQ ID NO: 18 - DNA, 16 bp, Artificial sequence
  Oligonucleotide motif
tcatttctatctgtat

SEQ ID NO: 19 - DNA, 20 bp, Artificial sequence
  Oligonucleotide motif
acagtgtttcaatcaagtag

SEQ ID NO: 20 - DNA, 18 bp, Artificial sequence
  Oligonucleotide motif
cagtgtttcaatcaagta

SEQ ID NO: 21 - DNA, 16 bp, Artificial sequence
  Oligonucleotide motif
cagtgtttcaatcaag

SEQ ID NO: 22 - DNA, 14 bp, Artificial sequence
  Oligonucleotide motif
gtgtttcaatcaag

SEQ ID NO: 23 - DNA, 147 bp, artificial sequence
  target site sequence
aaaagtcgatatacagagatacagatagaaatgatttgtaatatgacaaaagtcgatatacagagatacagatagaaatgatttgtaatatgacaaaagtcgatatacagagatacagatagaaatgatttgtaatatgacaaaagt

SEQ ID NO: 24 - DNA, 42 bp, Artificial sequence
  Target Site sequence
aagtcgatatacagagatacagatagaaatgatttgtaatat

SEQ ID NO: 25 - DNA, 35 bp, artificial sequence
  target site sequence
atatacaaagatacagatagaaatgatttgtaata

SEQ ID NO: 26 - DNA, 27 bp, artificial sequence
  target site sequence
agatacagatagaaatgatttgtaata

1. An antisense oligonucleotide of 10 to 50 nucleotides in length, which comprises a contiguous nucleotide sequence of 10 to 30 nucleotides in length with at least 90% complementarity, such as fully complementary to a mammalian ERC1 target nucleic acid, wherein the antisense oligonucleotide is capable of reducing the expression of the mammalian ERC1 target nucleic acid, in a cell.

2. The antisense oligonucleotide according to claim 1, wherein the contiguous nucleotide sequence is at least 90% complementary to a sequence selected from the group consisting of SEQ ID NO: 1, 2, 3, 4, 5, 6, 7, 8, 9, 10, 11, 12 and 13, or a naturally occurring variant thereof.

3. The antisense oligonucleotide according to claim 1, wherein the contiguous nucleotide sequence is fully complementary to the mammalian ERC1 target nucleic acid.

4. The antisense oligonucleotide according to claim 1, wherein the contiguous nucleotide sequence is at least 90% complementary, such as fully complementary, to an intron region present in the pre-mRNA of a mammalian ERC1 nucleic acid (e.g. SEQ ID NO:1).

5. The antisense oligonucleotide according to claim 1, wherein the contiguous nucleotide sequence is at least 90% complementary, such as fully complementary, to an intron region present in the pre-mRNA of human ERC1, selected from position 815-37239 on SEQ ID NO: 1, position 38065-92655 on SEQ ID NO: 1, position 93073-114241 on SEQ ID NO: 1, position 114317-119683 on SEQ ID NO: 1, position 119840-125357 on SEQ ID NO: 1, position 125526-151111 on SEQ ID NO: 1, position 151280-190031 on SEQ ID NO: 1, position 190170-191416 on SEQ ID NO: 1, position 191558-192772 on SEQ ID NO:1, position 192914-199350 on SEQ ID NO: 1, position 199545-246260 on SEQ ID NO: 1, position 246397-272525 on SEQ ID NO: 1, position 272658-299343 on SEQ ID NO: 1, position 299505-381324 on SEQ ID NO:1, position 381470-417640 on SEQ ID NO: 1, position 417740-454053 on SEQ ID NO: 1, and position 454243-499584 on SEQ ID NO: 1.

6. The antisense oligonucleotide according to claim 1, wherein the contiguous nucleotide sequence is at least 90% complementary, such as fully complementary, to position 38065-92655 of SEQ ID NO: 1.

7. The antisense oligonucleotide according to claim 1, wherein the contiguous nucleotide sequence is at least 90% complementary, such as fully complementary, to SEQ ID NO: 14, 12, 24, 25 or 26.

8. The antisense oligonucleotide of claim 1, wherein the contiguous nucleotide sequence is at least 90% complementary, such as fully complementary, to a target region of SEQ ID NO 1, selected from the group consisting of position 88284-88297, 88378-88391, 88425-88438, 88472-88485, 88517-88530, 88656-88669, 88703-88716, 88750-88763, 88795-88808, 88842-88855, 88889-88902, 88936-88949, 88983-88996, 89030-89043, 89077-89090, 89124-89137, 89171-89184, 89265-89278, 89312-89325, 89359-88372; 88374-88393, 88421-88440, 88468-88487, 88513-88532, 88652-88671, 88699-88718, 88746-88765, 88791-88810, 88838-88857, 88885-88904, 88932-88951, 88979-88998, 89026-89045, 89073-89092, 89120-89139, 89167-89186, 89261-89280, 89308-89327, 89355-89374; 88374-88391, 88421-88438, 88468-88485, 88513-88530, 88652-88669, 88699-88716, 88746-88763, 88791-88808, 88838-88855, 88885-88902, 88932-88949, 88979-88996, 89026-89043, 89073-89090, 89120-89137, 89167-89184, 89261-89278, 89308-89325, 89355-89372; 88376-88391, 88423-88438, 88470-88485, 88515-88530, 88654-88669, 88701-88716, 88748-88763, 88793-88808, 88840-88855, 88887-88902, 88934-88949, 88981-88996, 89028-89043, 89075-89090, 89122-89137, 89169-89184, 89263-89278, 89310-89325, 89357-89372, 451815-451834, 451816-451833, 451818-451833, 451818-451831 of SEQ ID NO: 1.

9. The antisense oligonucleotide according to claim 1, wherein the contiguous nucleotide sequence is at least 90% complementary, such as fully complementary, to a target region of 10-22, such as 14-20, nucleotides in length of the target nucleic acid of SEQ ID NO: 1, wherein the target region is repeated at least 2 times across the target nucleic acid.

10. The antisense oligonucleotide according to claim 1, wherein the contiguous nucleotide sequence is at least 90% identical, such as is 100% identical to a sequence selected from the group consisting of SEQ ID NO: 15, 16, 17, and 18.

11. The antisense oligonucleotide according claim 1, wherein the contiguous nucleotide sequence consists or comprises of a sequence selected from the group consisting of SEQ ID NO: 15, 16, 17, and 18.

12. The antisense oligonucleotide of claim 1, wherein the contiguous nucleotide sequence comprises one or more 2′sugar modified nucleosides.

13. The antisense oligonucleotide of claim 12, wherein the one or more 2′ sugar modified nucleosides is independently selected from the group consisting of 2′-O-alkyl-RNA, 2′-O-methyl-RNA, 2′-alkoxy-RNA, 2′-O-methoxyethyl-RNA, 2′-amino-DNA, 2′-fluoro-DNA, arabino nucleic acid (ANA), 2′-fluoro-ANA and LNA nucleosides.

14. The antisense oligonucleotide of claim 12, wherein the one or more 2′ sugar modified nucleosides is a LNA nucleoside.

15. The antisense oligonucleotide of claim 1, wherein the contiguous nucleotide sequence comprises at least one modified internucleoside linkage.

16. The antisense oligonucleotide of claim 1, wherein at least 50%, such as at least 75%, such as at least 90%, such as all of the internucleoside linkages within the contiguous nucleotide sequence are phosphorothioate internucleoside linkages.

17. The antisense oligonucleotide of claim 1, wherein the antisense oligonucleotide is capable of recruiting RNase H.

18. The antisense oligonucleotide of claim 1, wherein the antisense oligonucleotide or contiguous nucleotide sequence thereof, consists or comprises of a gapmer of formula 5′-F-G-F′-3′, where region F and F′ independently comprise 1-8 nucleosides, of which 1-5 are 2′ sugar modified nucleosides and defines the 5′ and 3′ end of the F and F′ region, and G is a region between 6 and 17 nucleosides which are capable of recruiting RNaseH, such as a region comprising 6-17 DNA nucleosides.

19. The antisense oligonucleotide of claim 1, wherein the antisense oligonucleotide, or contiguous nucleotide sequence thereof is selected from the group consisting of TCATttctatCTGT (Compound 15_1); AATCatttctatctgtaTCT (Compound 16_1); TCAtttctatctgtATCT (Compound 17_1); and TCATttctatctGTAT (Compound 18_1), wherein capital letters represent LNA nucleosides, such as beta-D-oxy LNA nucleosides, lower case letters represent DNA nucleosides, optionally, all LNA C are 5-methyl cytosine, and all the internucleoside linkages are phosphorothioate linkages.

20. A conjugate comprising the antisense oligonucleotide according to claim 1, and at least one conjugate moiety covalently attached to said oligonucleotide.

21. A pharmaceutically acceptable salt of the antisense oligonucleotide according to claim 1.

22. A pharmaceutical composition comprising the antisense oligonucleotide of claim 1 and a pharmaceutically acceptable diluent, solvent, carrier, salt and/or adjuvant.

23. An in vivo or in vitro method for inhibiting a mammalian ERC1 expression in a target cell which is expressing the mammalian ERC1, said method comprising administering an antisense oligonucleotide of claim 1 in an effective amount to said cell.

24. The antisense oligonucleotide of claim 1 for use in medicine.

25. The antisense oligonucleotide of claim 1, for use in the treatment or prevention of dengue virus infection or cancer, such as thyroid carcinoma, breast cancer, head and neck cancer, colorectal cancer, renal cancer, testis cancer, melanoma or metastatic cancer.

26. Use of the antisense oligonucleotide of claim 1, for the preparation of a medicament for treatment or prevention of dengue virus infection or cancer, such as thyroid carcinoma, breast cancer, head and neck cancer, colorectal cancer, renal cancer testis cancer, melanoma or metastatic cancer.

27. A pharmaceutically acceptable salt of the antisense oligonucleotide conjugate according to claim 20.

28. A pharmaceutical composition comprising the conjugate of claim 20 and a pharmaceutically acceptable diluent, solvent, carrier, salt and/or adjuvant.

29. An in vivo or in vitro method for inhibiting a mammalian ERC1 expression in a target cell which is expressing the mammalian ERC1, said method comprising administering the conjugate according to claim 20 in an effective amount to said cell.

30. The conjugate according to claim 20, for use in the treatment or prevention of dengue virus infection or cancer, such as thyroid carcinoma, breast cancer, head and neck cancer, colorectal cancer, renal cancer, testis cancer, melanoma or metastatic cancer.
